(19) United States
(12) Patent Application Publication
(10) Pub. No.: US 2025/0002541 A1
(43) Pub. Date: Jan. 2, 2025

(54) ENGINEERED CENTRAL NERVOUS SYSTEM COMPOSITIONS

(71) Applicants: The Broad Institute, Inc., Cambridge, MA (US); President and Fellows of Harvard College, Cambridge, MA (US); Massachusetts Institute of Technology, Cambridge, MA (US)

(72) Inventors: Pardis Sabeti, Cambridge, MA (US); Mohammadsharif Tabebordbar, Cambridge, MA (US); Simon Ye, Cambridge, MA (US); Alexandra Stanton, Cambridge, MA (US); Kim Lagerborg, Cambridge, MA (US)

(21) Appl. No.: 18/690,307

(22) PCT Filed: Sep. 8, 2022
(86) PCT No.: PCT/US22/76127

§ 371 Date: Mar. 8, 2024

Related U.S. Application Data
(60) Provisional application No. 63/242,014, filed on Sep. 8, 2021.
(60) Provisional application No. 63/322,191, filed on Mar. 21, 2022.

(51) Int. Cl. C07K 14/005; A61K 48/00; C12N 15/86

(52) U.S. Cl. CPC C07K 14/005; A61K 48/0041; C12N 15/86; C12N 2750/14122; C12N 2750/14143; C12N 2750/14145

(57) ABSTRACT

Described in several exemplary embodiments are compositions including a targeting moiety effective to target a central nervous system cell and formulations thereof. In certain embodiments, the targeting moiety is composed of a n-mer insert containing or being composed only of a P-motif. Also described in certain example embodiments are vector systems configured to generate polypeptides containing the one or more targeting moieties. Also described herein are methods of generating a targeting moiety effective to target a central nervous system cell and using the compositions containing the targeting moieties described herein, such as to deliver a cargo to a subject and/or treat a central nervous system disease, disorder, or system thereof.

### CROSS-REFERENCE TO RELATED APPLICATIONS

[0001] This application claims the benefit of and priority to U.S. Provisional Patent Application No. 63/242,014, filed on Sep. 8, 2021, and U.S. Provisional Patent Application No. 63/322,191, filed on Mar. 21, 2022, the contents of which are incorporated by reference herein in their entireties.

### REFERENCE TO AN ELECTRONIC SEQUENCE LISTING

[0002] This application contains a sequence listing filed in electronic form as an xml file entitled BROD-5465WP_ST26.xml, created on Sep. 8, 2022, and having a size of 10,872,431 bytes. The content of the sequence listing is incorporated herein in its entirety.

### TECHNICAL FIELD

[0003] The subject matter disclosed herein is generally directed to engineered central nervous system targeting compositions including, but not limited to, recombinant adeno-associated virus (AAV) vectors, and systems, compositions, and uses thereof.

### BACKGROUND

[0004] Recombinant AAVs (rAAVs) are the most commonly used delivery vehicles for gene therapy and gene editing. Nonetheless, rAAVs that contain natural capsid variants have limited cell tropism. Indeed, rAAVs used today mainly infect the liver after systemic delivery. Further, the transduction efficiency of conventional rAAVs in other cell-types, tissues, and organs by these conventional rAAVs with natural capsid variants is limited. Therefore, AAV-mediated polynucleotide delivery for diseased that affect cells, tissues, and organs other than the liver, such as the central nervous system) typically requires an injection of a large dose of virus (typically about 2×10¹⁴ vg/kg), which often results in liver toxicity. Furthermore, because large doses are required when using conventional rAAVs, manufacturing sufficient amounts of a therapeutic rAAV needed to dose adult patients is extremely challenging. Additionally, due to differences in gene expression and physiology, mouse and primate models respond differently to viral capsids. Transduction efficiency of different virus particles varies between different species, and as a result, preclinical studies in mice often do not accurately reflect results in primates, including humans. As such there exists a need for improved rAAVs for use in the treatment of various genetic diseases.

[0005] Citation or identification of any document in this application is not an admission that such a document is available as prior art to the present invention.

### SUMMARY

[0006] Described in certain example embodiments herein are compositions comprising a targeting moiety effective to target a central nervous system (CNS) cell, wherein the targeting moiety comprises an n-mer insert optionally comprising or consisting of a P-motif or a double valine motif, or both, wherein the P-motif comprises or consists of the amino acid sequence XₘPX₁X₂GTX₃RXₙ (SEQ ID NO: 8579), wherein X₁, X₂, X₃, Xₘ, and Xₙ, are each independently selected from any amino acid, wherein m is 0, 1, 2, or 3, and wherein n is 0, 1, 2, 3, 4, 5, 6, or 7, wherein the double valine motif comprises or consists of the amino acid sequence XₘX₁X₂VX₃X₄VX₅Xₙ, wherein X₁, X₂, X₃, Xₘ, and Xₙ, are each independently selected from any amino acid, wherein m is 0, 1, 2, or 3, and wherein n is 0, 1, 2, 3, 4, 5, 6, or 7; and optionally a cargo, wherein the cargo is coupled to or is otherwise associated with the targeting moiety.

[0007] In certain example embodiments, X₂ of the P motif is Q, P, E, or H. In certain example embodiments, X₁ of the P motif is a polar amino acid, optionally a polar uncharged amino acid. In certain example embodiments, X₃ of the P motif is a nonpolar amino acid. In certain example embodiments, X₁ of the double valine motif is R, K, V, or W. In certain example embodiments, X₂ of the double valine motif is T, S, V, Y or R.

[0008] In certain example embodiments, X₃ of the double valine motif is G, P, or S. In certain example embodiments, X₄ of the double valine motif is S, D, or T. In certain example embodiments, X₅ of the double valine motif is Y, G, S, or L.

[0009] In certain example embodiments, the targeting moiety comprises two or more n-mer inserts, optionally wherein each n-mer insert comprises or consists of a P-motif, wherein at least one of the P-motifs comprise or consists of the amino acid sequence XₘPX₁X₂GTX₃RXₙ (SEQ ID NO: 8579), wherein X₁, X₂, X₃, Xₘ, and Xₙ, are each independently selected from any amino acid, wherein m is 0, 1, 2, or 3, and wherein n is 0, 1, 2, 3, 4, 5, 6, or 7, optionally wherein X₂ of the P motif is Q, P, E, or H, optionally wherein the X₁ of the P motif is a polar amino acid, optionally a polar uncharged amino acid, and optionally wherein X₃ of the P motif is a nonpolar amino acid.

[0010] In certain example embodiments, the n-mer insert(s) and/or at least one P-motif and/or double valine motif is selected from any one n-mer insert and/or is encoded by a polynucleotide as set forth in one or more of SEQ ID NOs: 332-582 (Table 7), SEQ ID NOs: 583-8578 (Table 8), SEQ ID NOs: 3-819, 21-22, 24, 200, 202, 204, 212, 218, 224, 226, 228, 286, 234, 258, 260, 647, 649, 923, 1069, 1077, 1265, 2439, 2529, 2759, 3283, 3553, 3923, 4005, 4173, 4537, 4593, 4599, 4601, 4605, 4619, 4665, 4751, 4759, 4825, 4909, 4933, 5013, 5091, 5107, 5127, 5131, 5165, 5177, 5181, 5187, 5189, 5191, 5277, 5287, 5401, 5433, 5631, 5633, 5731, 5741, 5937, 6019, 6045, 6139, 6169, 6497, 7335, 8033, 8269, 8596-8613, (FIGS. 15A, 15B, 17A, 16A, 16B, 16C, and 19A-19C).

[0011] In certain example embodiments, the n-mer insert is 3-25 or 3-15 amino acids in length.

[0012] In certain example embodiments, X₁ of the P motif is S, T, N, Q, C, Y or A, X₂ of the P motif is Q, P, E, or H, X₃ is G, A, M, W, L, V, F, or I, or any combination thereof.

[0013] In certain example embodiments, the targeting moiety comprises a polypeptide, a polynucleotide, a lipid, a polymer, a sugar, or any combination thereof, wherein the polypeptide, the polynucleotide, the lipid, the polymer, the sugar, or any combination thereof is operably coupled to the n-mer insert(s).

[0014] In certain example embodiments, the targeting moiety comprises a viral polypeptide.

[0015] In certain example embodiments, the viral polypeptide is a capsid polypeptide.

[0016] In certain example embodiments, the n-mer insert(s) is/are incorporated into the viral polypeptide such that at least the n-mer insert is located between two amino acids of the viral polypeptide such that at least the n-mer insert is external to a viral capsid.

[0017] In certain example embodiments, the viral polypeptide is an adeno associated virus (AAV) polypeptide.

[0018] In certain example embodiments, the AAV polypeptide is an AAV capsid polypeptide.

[0019] In certain example embodiments, one or more of the n-mer insert(s) are each incorporated into the AAV polypeptide such that the n-mer insert, optionally the P motif(s) and/or double valine motif(s), is/are inserted between any two contiguous amino acids independently selected from amino acids 262-269, 327-332, 382-386, 452-460, 488-505, 527-539, 545-558, 581-593, 598-599, 704-714, or any combination thereof in an AAV9 capsid polypeptide or in an analogous position in an AAV1, AAV2, AAV3, AAV4, AAV5, AAV6, AAV7, AAV8, AAV rh.74, AAV rh.10, AAV12, AAV.DJ, AAV.ie, AAV1.9-3, AAV.Anc80, AAV.Anc80L65, AAV2.7m8, or AAV8BP2 capsid polypeptide.

[0020] In certain example embodiments, at least one n-mer insert is incorporated into the AAV polypeptide such that at least the P motif and/or double valine motif is inserted between amino acids 588 and 589 in an AAV9 capsid polypeptide or in an analogous position in an AAV1, AAV2, AAV3, AAV4, AAV5, AAV6, AAV7, AAV8, AAV rh.74, AAV rh.10, AAV12, AAV.DJ, AAV.ie, AAV1.9-3, AAV.Anc80, AAV.Anc80L65, AAV2.7m8, or AAV8BP2 capsid polypeptide.

[0021] In certain example embodiments, the AAV capsid polypeptide is an engineered AAV capsid polypeptide having reduced or eliminated uptake in a non-CNS cell as compared to a corresponding wild-type AAV capsid polypeptide.

[0022] In certain example embodiments, the non-CNS cell is a liver cell or a dorsal root ganglion (DRG) neuron.

[0023] In certain example embodiments, the wild-type capsid polypeptide is an AAV1, AAV2, AAV3, AAV4, AAV5, AAV6, AAV7, AAV8, AAV9, AAV rh.74, AAV rh.10, AAV12, AAV.DJ, AAV.ie, AAV1.9-3, AAV.Anc80, AAV.Anc80L65, AAV2.7m8, or AAV8BP2 capsid polypeptide.

[0024] In certain example embodiments, the engineered AAV capsid polypeptide comprises one or more mutations that result in reduced or eliminated uptake in a non-CNS cell. In certain example embodiments, the one or more mutations are in position 267, in position 269, in position 272, in position 504, in position 505, in position 585, in position 590, or any combination thereof in the AAV9 capsid polypeptide (SEQ ID NO: 1) or in one or more positions corresponding thereto in a non-AAV9 capsid polypeptide.

[0025] In certain example embodiments, the non-AAV9 capsid polypeptide is an AAV1, AAV2, AAV3, AAV4, AAV5, AAV6, AAV7, AAV8, AAV rh.74, AAV rh.10, AAV12, AAV.DJ, AAV.ie, AAV1.9-3, AAV.Anc80, AAV.Anc80L65, AAV2.7m8, or AAV8BP2 capsid polypeptide.

[0026] In certain example embodiments, the mutation in position 267 in the AAV9 capsid polypeptide (SEQ ID NO: 1) or position corresponding thereto in a non-AAV9 capsid polypeptide is a G or X mutation to A, wherein X is any amino acid.

[0027] In certain example embodiments, the mutation in position 269 in the AAV9 capsid polypeptide (SEQ ID NO: 1) or position corresponding thereto in a non-AAV9 capsid polypeptide is an S or X to T mutation, wherein X is any amino acid.

[0028] In certain example embodiments, the mutation in position 272 in the AAV9 capsid polypeptide (SEQ ID NO: 1) or position corresponding thereto in a non-AAV9 capsid polypeptide is an N or to A mutation, wherein X is any amino acid.

[0029] In certain example embodiments, the mutation in position 504 in the AAV9 capsid polypeptide (SEQ ID NO: 1) or position corresponding thereto in a non-AAV9 capsid polypeptide is a G or X to A mutation, wherein X is any amino acid.

[0030] In certain example embodiments, the mutation in position 505 in the AAV9 capsid polypeptide (SEQ ID NO: 1) or position corresponding thereto in a non-AAV9 capsid polypeptide is a P or X to A mutation, wherein X is any amino acid.

[0031] In certain example embodiments, the mutation in position 585 in the AAV9 capsid polypeptide (SEQ ID NO: 1) or position corresponding thereto in a non-AAV9 capsid polypeptide is an R or X to Q mutation, wherein X is any amino acid.

[0032] In certain example embodiments, the mutation in position 590 in the AAV9 capsid polypeptide (SEQ ID NO: 1) or position corresponding thereto in a non-AAV9 capsid polypeptide is a Q or X to A mutation, wherein X is any amino acid.

[0033] In certain example embodiments, the engineered AAV capsid polypeptide is an engineered AAV9 capsid polypeptide comprising a mutation at position 267, position 269 or both of a wild-type AAV9 capsid polypeptide (SEQ ID NO: 1), wherein the mutation at position 267 is a G to A mutation and wherein the mutation at position 269 is an S to T mutation.

[0034] In certain example embodiments, the engineered AAV capsid polypeptide is an engineered AAV9 capsid polypeptide comprising a mutation at position 590 of a wild-type AAV9 capsid polypeptide (SEQ ID NO: 1), wherein the mutation at position 509 is a Q to A mutation.

[0035] In certain example embodiments, the engineered AAV capsid polypeptide is an engineered AAV9 capsid polypeptide comprising a mutation at position 504, position 505, or both of a wild-type AAV9 capsid protein (SEQ ID NO: 1), wherein the mutation at position 504 is a G to A mutation and wherein the mutation at position 505 is a P to A mutation.

[0036] In certain example embodiments, the composition is an engineered viral particle.

[0037] In certain example embodiments, the engineered viral particle is an engineered AAV viral particle. In certain example embodiments, the AAV viral particle is an engineered AAV1, AAV2, AAV3, AAV4, AAV5, AAV6, AAV7, AAV8, AAV9, AAV rh.74, AAV rh.10, AAV12, AAV.DJ, AAV.ie, AAV1.9-3, AAV.Anc80, AAV.Anc80L65, AAV2.7m8, or AAV8BP2 viral particle.

[0038] In certain example embodiments, the optional cargo is capable of treating or preventing a CNS, an eye, or inner ear disease or disorder. In certain example embodiments, the optional cargo is also detargeted in a non-target cell, optionally a CNS cell.

[0039] In certain example embodiments, the optional cargo comprises one or more specific RNAi molecule binding sequences specific for an RNAi molecule endogenous to a non-target cell, wherein expression of the RNAi molecule(s) is/are enriched in the non-target cell as compared to a CNS cell and/or specific for synthetic RNAi molecule(s). In certain example embodiments, the RNAi molecule is not expressed in a CNS cell. In certain example embodiments, the non-target cell is a liver cell or a dorsal root ganglion neuron. In certain example embodiments, the RNAi molecule is miR183, miR-182, miR122, miR122a, miR99a, miR-26a, miR199a, miRNA-143, miR101a, miR-30c, or any combination thereof.

[0040] Described in certain example embodiments herein are vector systems comprising one or more polynucleotides, wherein at least one of the one or more polynucleotides encodes all or part of a targeting moiety effective to target a central nervous system (CNS) cell, wherein the targeting moiety comprises an n-mer insert optionally comprising or consisting of a P-motif or a double valine motif, or both, wherein the P-motif comprises or consists of the amino acid sequence XₘPX₁X₂GTX₃RXₙ (SEQ ID NO: 8579), wherein X₁, X₂, X₃, Xₘ, and Xₙ, are each independently selected from any amino acid, wherein m is 0, 1, 2, or 3, and wherein n is 0, 1, 2, 3, 4, 5, 6, or 7, wherein the double valine motif comprises or consists of the amino acid sequence XₘX₁X₂VX₃X₄VX₅Xₙ, wherein X₁, X₂, X₃, Xₘ, and Xₙ, are each independently selected from any amino acid, wherein m is 0, 1, 2, or 3, and wherein n is 0, 1, 2, 3, 4, 5, 6, or 7; and optionally, a regulatory element operatively coupled to one or more of the one or more polynucleotides.

[0041] In certain example embodiments, X₂ of the P motif is Q, P, E, or H. In certain example embodiments, X₁ of the P motif is a polar amino acid, optionally a polar uncharged amino acid. In certain example embodiments, X₃ of the P motif is a nonpolar amino acid.

[0042] In certain example embodiments, X₁ of the double valine motif is R, K, V, or W. In certain example embodiments, X₂ of the double valine motif is T, S, V, Y or R. In certain example embodiments, X₃ of the double valine motif is G, P, or S. In certain example embodiments, X₄ of the double valine motif is S, D, or T. In certain example embodiments, X₅ of the double valine motif is Y, G, S, or L.

[0043] In certain example embodiments, the targeting moiety comprises two or more n-mer inserts, optionally wherein each n-mer insert comprises or consists of a P-motif, wherein at least one of the P-motifs comprise or consists of the amino acid sequence XₘPX₁X₂GTX₃RXₙ (SEQ ID NO: 8579), wherein X₁, X₂, X₃, Xₘ, and Xₙ, are each independently selected from any amino acid, wherein m is 0, 1, 2, or 3, and wherein n is 0, 1, 2, 3, 4, 5, 6, or 7, optionally wherein X₂ of the P motif is Q, P, E, or H, optionally wherein the X₁ of the P motif is a polar amino acid, optionally a polar uncharged amino acid, and optionally wherein X₃ of the P motif is a nonpolar amino acid.

[0044] In certain example embodiments, the n-mer insert(s) and/or at least one P-motif and/or double valine motif is selected from any one n-mer insert and/or is encoded by a polynucleotide as set forth in one or more of SEQ ID NOs: 332-582 (Table 7), SEQ ID NOs: 583-8578 (Table 8), SEQ ID NOs: 3-819, 21-22, 24, 200, 202, 204, 212, 218, 224, 226, 228, 286, 234, 258, 260, 647, 649, 923, 1069, 1077, 1265, 2439, 2529, 2759, 3283, 3553, 3923, 4005, 4173, 4537, 4593, 4599, 4601, 4605, 4619, 4665, 4751, 4759, 4825, 4909, 4933, 5013, 5091, 5107, 5127, 5131, 5165, 5177, 5181, 5187, 5189, 5191, 5277, 5287, 5401, 5433, 5631, 5633, 5731, 5741, 5937, 6019, 6045, 6139, 6169, 6497, 7335, 8033, 8269, 8596-8613, (FIGS. 15A, 15B, 17A, 16A, 16B, 16C, and 19A-19C).

[0045] In certain example embodiments, the n-mer insert(s) are each 3-25 or 3-15 amino acids in length.

[0046] In certain example embodiments, X₁ of the P motif is S, T, N, Q, C, Y or A, X₂ of the P motif is Q, P, E, or H, X₃ is G, A, M, W, L, V, F, or I, or any combination thereof.

[0047] In certain example embodiments, the vector system further comprises a cargo.

[0048] In certain example embodiments, the cargo is a cargo polynucleotide and is optionally operatively coupled to one or more of the one or more polynucleotides encoding the targeting moiety.

[0049] In certain example embodiments, the vector system is a viral vector system and is capable of producing virus particles, virus particles that contain the cargo, or both.

[0050] In certain example embodiments, the vector system is capable of producing a polypeptide comprising one or more of the targeting moieties.

[0051] In certain example embodiments, the polypeptide is a viral polypeptide.

[0052] In certain example embodiments, the viral polypeptide is a capsid polypeptide.

[0053] In certain example embodiments, the capsid polypeptide is an adeno associated virus (AAV) capsid polypeptide. In certain example embodiments, the virus particles are AAV virus particles. In certain example embodiments, the AAV virus particles or AAV capsid polypeptide are engineered AAV1, AAV2, AAV3, AAV4, AAV5, AAV6, AAV7, AAV8, AAV9, AAV rh.74, AAV rh.10, AAV12, AAV.DJ, AAV.ie, AAV1.9-3, AAV.Anc80, AAV.Anc80L65, AAV2.7m8, or AAV8BP2 viral particles or polypeptides.

[0054] In certain example embodiments, the n-mer insert(s) is/are incorporated into the viral polypeptide such that at least the n-mer insert is located between two amino acids of the viral polypeptide such that at least the n-mer insert is/are external to a viral capsid.

[0055] In certain example embodiments, the n-mer insert(s), optionally the P-motif(s) and/or double valine motif(s), are each inserted between any two contiguous amino acids independently selected from amino acids 262-269, 327-332, 382-386, 452-460, 488-505, 527-539, 545-558, 581-593, 598-599, 704-714, or any combination thereof in an AAV9 capsid polypeptide or in an analogous position in an AAV1, AAV2, AAV3, AAV4, AAV5, AAV6, AAV7, AAV8, AAV rh.74, AAV rh.10, AAV12, AAV.DJ, AAV.ie, AAV1.9-3, AAV.Anc80, AAV.Anc80L65, AAV2.7m8, or AAV8BP2 capsid polypeptide.

[0056] In certain example embodiments, the at least one polynucleotide that encodes all or part of a targeting moiety is inserted between the codons corresponding to amino acid 588 and 589 in the AAV9 capsid polynucleotide or in an analogous position in an AAV1, AAV2, AAV3, AAV4, AAV5, AAV6, AAV7, AAV8, AAV rh.74, AAV rh.10, AAV12, AAV.DJ, AAV.ie, AAV1.9-3, AAV.Anc80, AAV.Anc80L65, AAV2.7m8, or AAV8BP2 capsid polypeptide.

[0057] In certain example embodiments, the AAV capsid polypeptide is an engineered AAV capsid polypeptide having reduced or eliminated uptake in a non-CNS cell as compared to a corresponding wild-type AAV capsid polypeptide. In certain example embodiments, the non-CNS cell is a liver cell or a dorsal root ganglion (DRG) neuron. In certain example embodiments, the wild-type capsid polypeptide is an AAV1, AAV2, AAV3, AAV4, AAV5, AAV6, AAV7, AAV8, AAV9, AAV rh.74, AAV rh.10, AAV12, AAV.DJ, AAV.ie, AAV1.9-3, AAV.Anc80, AAV.Anc80L65, AAV2.7m8, or AAV8BP2 capsid polypeptide.

[0058] In certain example embodiments, the engineered AAV capsid polypeptide comprises one or more mutations that result in reduced or eliminated uptake in a non-CNS cell. In certain example embodiments, the one or more mutations are in position 267, in position 269,in position 272,in position 504, in position 505, in position 585, in position 590, or any combination thereof in the AAV9 capsid polypeptide (SEQ ID NO: 1) or in one or more positions corresponding thereto in a non-AAV9 capsid polypeptide. In certain example embodiments, the non-AAV9 capsid polypeptide is an AAV1, AAV2, AAV3, AAV4, AAV5, AAV6, AAV7, AAV8, AAV rh.74, AAV rh.10, AAV12, AAV.DJ, AAV.ie, AAV1.9-3, AAV.Anc80, AAV.Anc80L65, AAV2.7m8, or AAV8BP2 capsid polypeptide.

[0059] In certain example embodiments, the mutation in position 267 in the AAV9 capsid polypeptide (SEQ ID NO: 1) or position corresponding thereto in a non-AAV9 capsid polypeptide is a G or X mutation to A, wherein X is any amino acid.

[0060] In certain example embodiments, the mutation in position 269 in the AAV9 capsid polypeptide (SEQ ID NO: 1) or position corresponding thereto in a non-AAV9 capsid polypeptide is an S or X to T mutation, wherein X is any amino acid.

[0061] In certain example embodiments, the mutation in position 272 in the AAV9 capsid polypeptide (SEQ ID NO: 1) or position corresponding thereto in a non-AAV9 capsid polypeptide is an N or to A mutation, wherein X is any amino acid.

[0062] In certain example embodiments, the mutation in position 504 in the AAV9 capsid polypeptide (SEQ ID NO: 1) or position corresponding thereto in a non-AAV9 capsid polypeptide is a G or X to A mutation, wherein X is any amino acid.

[0063] In certain example embodiments, the mutation in position 505 in the AAV9 capsid polypeptide (SEQ ID NO: 1) or position corresponding thereto in a non-AAV9 capsid polypeptide is a P or X to A mutation, wherein X is any amino acid.

[0064] In certain example embodiments, the mutation in position 585 in the AAV9 capsid polypeptide (SEQ ID NO: 1) or position corresponding thereto in a non-AAV9 capsid polypeptide is an R or X to Q mutation, wherein X is any amino acid.

[0065] In certain example embodiments, the mutation in position 590 in the AAV9 capsid polypeptide (SEQ ID NO: 1) or position corresponding thereto in a non-AAV9 capsid polypeptide is a Q or X to A mutation, wherein X is any amino acid.

[0066] In certain example embodiments, the engineered AAV capsid polypeptide is an engineered AAV9 capsid polypeptide comprising a mutation at position 267, position 269, or both of a wild-type AAV9 capsid polypeptide (SEQ ID NO: 1), wherein the mutation at position 267 is a G to A mutation and wherein the mutation at position 269 is an S to T mutation.

[0067] In certain example embodiments, the engineered AAV capsid polypeptide is an engineered AAV9 capsid polypeptide comprising a mutation at position 590 of a wild-type AAV9 capsid polypeptide (SEQ ID NO: 1), wherein the mutation at position 509 is a Q to A mutation.

[0068] In certain example embodiments, engineered AAV capsid protein is an engineered AAV9 capsid polypeptide comprising a mutation at position 504, position 505, or both of a wild-type AAV9 capsid polypeptide (SEQ ID NO: 1), wherein the mutation at position 504 is a G to A mutation and wherein the mutation at position 505 is a P to A mutation.

[0069] In certain example embodiments, the cargo comprises one or more specific RNAi molecule binding sequences specific for an RNAi molecule endogenous to a non-target cell, wherein expression of the RNAi molecule(s) is/are enriched in the non-target cell as compared to a CNS cell and/or specific for synthetic RNAi molecule(s). In certain example embodiments, the RNAi molecule is not expressed in a CNS cell. In certain example embodiments, the non-target cell is a liver cell or a dorsal root ganglion neuron. In certain example embodiments, the RNAi molecule is miR183, miR-182, miR122, miR122a, miR99a, miR-26a, miR199a, miRNA-143, miR101a, miR-30c, or any combination thereof.

[0070] In some embodiments, the viral polypeptide is optionally a capsid polypeptide, wherein the composition is modified to include one or more azides, have a reduced number of one or more oxidation susceptible residues, wherein the oxidation susceptible residues are optionally Met, Tyr, Trp, His, Cys or any combination thereof; is PEGylated, or is otherwise functionalized for PEGylation; comprises one or more oligonucleotides tethered via click chemistry to the composition, optionally viral polypeptide; or any combination thereof.

[0071] In certain example embodiments, the viral vector and/or cargo is engineered to include one or more cis-acting elements or modifications, optionally a reduced number of CpG islands; one or more TLR9i oligonucleotides, optionally in one or both of the inverted terminal repeats of the vector system; one or more regulatory elements to modify cargo expression; a reduced number of ITR mimicking harpin or other structures; or any combination thereof.

[0072] In certain example embodiments, the vector comprising the one or more polynucleotides does not comprise splice regulatory elements.

[0073] In certain example embodiments, the vector system further comprises a polynucleotide that encodes a viral rep protein. In certain example embodiments, the viral rep polypeptide is an AAV rep protein. In certain example embodiments, the polynucleotide that encodes the viral rep polypeptide is on the same vector or a different vector as the one or more polynucleotides encoding the targeting moiety or portion thereof. In certain example embodiments, the polynucleotide that encodes the viral rep protein is operatively coupled to a regulatory element.

[0074] In certain example embodiments, the vector system is capable of producing a composition or portion thereof as described in any one of the preceding paragraphs or elsewhere herein.

[0075] Described in certain example embodiments herein are polynucleotides that encode a composition or portion thereof as described in any one of the preceding paragraphs or elsewhere herein.

[0076] Described in certain example embodiments herein are polypeptides encoded by, produced by, or both by a vector system as described in any one of the preceding paragraphs or elsewhere herein or a polynucleotide as described in any one of the preceding paragraphs or elsewhere herein.

[0077] In certain example embodiments, the polypeptide is a viral polypeptide. In certain example embodiments, the viral polypeptide is an AAV polypeptide. In certain example embodiments, the polypeptide is coupled to or otherwise associated with a cargo.

[0078] In certain example embodiments, the cargo comprises one or more specific RNAi molecule binding sequences specific for an RNAi molecule endogenous to a non-target cell, wherein expression of the RNAi molecule(s) is/are enriched in the non-target cell as compared to a CNS cell and/or specific for synthetic RNAi molecule(s). In certain example embodiments, the RNAi molecule is not expressed in a CNS cell. In certain example embodiments, the non-target cell is a liver cell or a dorsal root ganglion neuron. In certain example embodiments, the RNAi molecule is miR183, miR-182, miR122, miR122a, miR99a, miR-26a, miR199a, miRNA-143, miR101a, miR-30c, or any combination thereof.

[0079] In certain example embodiments, the polypeptide includes one or more azides; has a reduced number of one or more oxidation susceptible residues, wherein the oxidation susceptible residues are optionally Met, Tyr, Trp, His, Cys or any combination thereof; is PEGylated, or is otherwise functionalized for PEGylation; comprises one or more oligonucleotides tethered via click chemistry to the composition, optionally viral polypeptide; or any combination thereof.

[0080] Described in certain example embodiments herein are particles produced by a vector system as described in any one of the preceding paragraphs or elsewhere herein, optionally including a polypeptide s described in any one of the preceding paragraphs or elsewhere herein. In certain example embodiments, the particle is a viral particle. In certain example embodiments, the viral particle is an adeno-associated virus (AAV) particle, lentiviral particle, or a retroviral particle. In certain example embodiments, the particle comprises a cargo. In certain example embodiments, the viral particle has a central nervous system (CNS) tropism.

[0081] In certain example embodiments, the cargo comprises one or more specific RNAi molecule binding sequences specific for an RNAi molecule endogenous to a non-target cell, wherein expression of the RNAi molecule(s) is/are enriched in the non-target cell as compared to a CNS cell and/or specific for synthetic RNAi molecule(s). In certain example embodiments, the RNAi molecule is not expressed in a CNS cell. In certain example embodiments, non-target cell is a liver cell or a dorsal root ganglion neuron. In certain example embodiments, the RNAi molecule is miR183, miR-182, miR122, miR122a, miR99a, miR-26a, miR199a, miRNA-143, miR101a, miR-30c, or any combination thereof.

[0082] In certain example embodiments, the polypeptide includes one or more azides; has a reduced number of one or more oxidation susceptible residues, wherein the oxidation susceptible residues are optionally Met, Tyr, Trp, His, Cys or any combination thereof; is PEGylated, or is otherwise functionalized for PEGylation; comprises one or more oligonucleotides tethered via click chemistry to the composition, optionally viral polypeptide; or any combination thereof.

[0083] In certain example embodiments of the vector system, polynucleotide, polypeptide or any combination thereof, the cargo is capable of treating or preventing a CNS, an eye, or an inner ear disease or disorder. In certain example embodiments, the cargo is also detargeted in a non-target cell, optionally a CNS cell.

[0084] Described in certain example embodiments herein are cell(s) comprising a composition as described in any one of the preceding paragraphs or elsewhere herein; a vector system as described in any one of the preceding paragraphs or elsewhere herein; a polynucleotide as described in any one of the preceding paragraphs or elsewhere herein; a polypeptide as described in any one of the preceding paragraphs or elsewhere herein; a particle as described in any one of the preceding paragraphs or elsewhere herein; or any combination thereof. In certain example embodiments, the cell(s) is/are prokaryotic. In certain example embodiments, the cell(s) is/are eukaryotic.

[0085] Described in certain example embodiments herein are pharmaceutical formulation(s) comprising a composition as described in any one of the preceding paragraphs or elsewhere herein; a vector system as described in any one of the preceding paragraphs or elsewhere herein; a polynucleotide as described in any one of the preceding paragraphs or elsewhere herein; a polypeptide as described in any one of the preceding paragraphs or elsewhere herein; a particle as described in any one of the preceding paragraphs or elsewhere herein; a cell as described in any one of the preceding paragraphs or elsewhere herein; or any combination thereof; and a pharmaceutically acceptable carrier.

[0086] Described in certain example embodiments herein are methods of treating or preventing a central nervous system, an eye, or an inner ear disease, disorder, or a symptom thereof comprising administering, to the subject in need thereof, a composition as described in any one of the preceding paragraphs or elsewhere herein; a vector system as described in any one of the preceding paragraphs or elsewhere herein; a polynucleotide as described in any one of the preceding paragraphs or elsewhere herein; a polypeptide as described in any one of the preceding paragraphs or elsewhere herein; a particle as described in any one of the preceding paragraphs or elsewhere herein; a cell as described in any one of the preceding paragraphs or elsewhere herein; a pharmaceutical formulation as described in any one of the preceding paragraphs or elsewhere herein; or any combination thereof.

[0087] In certain example embodiments, the central nervous system disease or disorder comprises a secondary muscle disease, disorder, or symptom thereof.

[0088] In certain example embodiments, the central nervous system disease or disorder is Friedreich's Ataxia, Dravet Syndrome, Spinocerebellar Ataxia Type 3, Niemann Pick Type C, Huntington's Disease, Pompe Disease, Myotonic Dystrophy Type 1, Glut1 Deficiency Syndrome (De Vivo Syndrome), Tay-Sachs, Spinal Muscular Atrophy, Alzheimer's disease, Amyotrophic lateral sclerosis (ALS), Danon disease, Rett Syndrome, Angleman Syndrome, infantile neuronal dystorpy, Gaucher's disease, Krabbe disease, metachromatic leukodystrophy, Salla disease, Farber disease or Spinal Musular Atrophy with progressive myoclonic Epilepsy (also reffered to as Jankovic-Rivera syndrome, Unverricht-Lundborg disease, AADC deficiency, Parkinson's disease, Batten disease, a neuronal ceroid lipofuscinosis disease, giant axonal neuropathy, a mucopolysaccharidosis disease (e.g., Hurler syndrome, MPS III A-D), neurofibromatosis, a spinocerebellar ataxia disease, Sandoff disease, GM2 gangliosidosis, Canavan disease, Cockayne syndrome, or any combination thereof

[0089] In certain example embodiments, the eye disease or disorder is Stargardt disease, a Leber's congenital amaurosis (LCA) (e.g., Leber's congenital amaurosis type 2, LEBER CONGENITALAMAUROSIS (LCA) ANDEARLY-ONSET SEVERE RETINALDYSTROPHY (EOSRD)), Choroideremia, a macular degeneration, diabetic retinopathy, a retinopathy, vitelliform macular dystrophy, a macular dystrophy, Sorsby's fundus dystrophy, cataracts, glaucoma, optic neuropathies, Marfan syndrome, myopia, polypoidal choroidal vasculopathies, retinitis pigmentosa, uveal melanoma, X-linked retinoschisis, pattern dystrophy, achromatopsia, Blue cone monochromatism, Bornholm eye disease, ADGUCA1A-associated COD/CORD, autosomal dominant PRPH2 associated CORD, X-linkedRPGR-associatedCOD/CORD, fundus albipunctatus, Enhanced S-conesyndrome, Bietti crystalline comeoretinaldystorphy, or any combination thereof.

[0090] In certain example embodiments, the inner ear disease or disorder is GJB-2 deafness, Jeryell and Lange-Nielsen syndrome, Usher syndrome, Alport syndrome, Branchio-oto-renal syndrome, Waardenburg syndrome, Pendred syndrome, Stickler syndrome, Treacher Collins syndrome, CHARGE syndrome, Norrie disease, Perrault syndrome, Autosomal dominant Nonsyndromic hearing loss, utosomal Recessive Nonsyndromic Hearing Loss, X-linked nonsyndromic hearing loss, an auditory neuropathy, a congenital hearing loss, or any combination thereof.

[0091] These and other aspects, objects, features, and advantages of the example embodiments will become apparent to those having ordinary skill in the art upon consideration of the following detailed description of example embodiments.

### BRIEF DESCRIPTION OF THE DRAWINGS

[0092] An understanding of the features and advantages of the present invention will be obtained by reference to the following detailed description that sets forth illustrative embodiments, in which the principles of the invention may be utilized, and the accompanying drawings of which:

[0093] FIG. 1 shows the adeno-associated virus (AAV) transduction mechanism, which results in production of mRNA from the transgene.

[0094] FIG. 2 shows a graph that can demonstrate that mRNA-based selection of AAV variants can be more stringent than DNA-based selection. The virus library was expressed under the control of a CMV promoter.

[0095] FIGS. 3A-3B show graphs that can demonstrate a correlation between the virus library and vector genome DNA (FIG. 3A) and mRNA (FIG. 3B) in the liver.

[0096] FIGS. 4A-4F show graphs that can demonstrate capsid variants present at the DNA level, and expressed at the mRNA level identified in different tissues. For this experiment, the virus library was expressed under the control of a CMV promoter.

[0097] FIGS. 5A-5C show graphs that can demonstrate capsid mRNA expression in different tissues under the control of cell-type specific promoters (as noted on x-axis). CMV was included as an exemplary constitutive promoter. CK8 is a muscle-specific promoter. MHCK7 is a muscle-specific promoter. hSyn is a neuron specific promoter. Expression levels from the cell type-specific promoters have been normalized based on expression levels from the constitutive CMV promoter in each tissue.

[0098] FIGS. 6A-6B show (FIG. 6A) a schematic demonstrating embodiments of a method of producing and selecting capsid variants for tissue-specific gene delivery across species and (FIG. 6B) a schematic demonstrating benchmarking of the top selected capsids.

[0099] FIG. 7 shows a schematic demonstrating embodiments of generating an AAV capsid variant library, particularly insertion of a random n-mer (n=3-15 amino acids) into a wild-type AAV, e.g., AAV9.

[0100] FIG. 8 shows a schematic demonstrating embodiments of generating an AAV capsid variant library, particularly variant AAV particle production. Each capsid variant encapsulates its own coding sequence as the vector genome.

[0101] FIG. 9 shows schematic vector maps of representative AAV capsid plasmid library vectors (see e.g., FIG. 8) that can be used in an AAV vector system to generate an AAV capsid variant library.

[0102] FIG. 10 shows a graph that can demonstrate the viral titer (calculated as AAV9 vector genome/15 cm dish) produced by constructs containing different constitutive and cell-type specific mammalian promoters.

[0103] FIGS. 11A-11P show results from benchmarking the top selected capsids from the first and second round of selection.

[0104] FIGS. 12A-12C show a comparison of transduction between the EVGPTQGTVR (SEQ ID NO: 332) capsid insert variant with AAV9 in NHP tissues.

[0105] FIGS. 13A-13C show a comparison of the vector genome biodistribution between the EVGPTQGTVR (SEQ ID NO: 332) capsid insert variant with AAV9 in NHP tissues.

[0106] FIG. 14A-14B—The DELIVER strategy selects for AAV capsid variants with an enhanced ability to transcribe transgene mRNA in the tissue of interest. (FIG. 14A) (SEQ ID NO: 8614) Map of self-packaging capsid library construct for DELIVER. (FIG. 14B) Schematic of selection using DELIVER.

[0107] FIG. 15A-15F—Selection with DELIVER yields potent CNS-tropic capsid variants in multiple mouse strains. (FIGS. 15A and 15B) Amino acid sequence and logo of the 7-mer insert in the 10 most enriched capsid variants with the (FIG. 15A) (SEQ ID NO: 3-8) AQ or (FIG. 15B) (SEQ ID NO: 19, 21-22, 24, 647, 649) DG prefix in the brain of 8 week old C57BL6J and BALB/cJ mice injected with 1E+12 vectorgenomes (vg) virus library following two rounds of selection with DELIVER. Sequences with the same color in each table are encoded by synonymous DNA codons. (FIG. 15C) Predicted structure of the VR-VIII surface loops of AAV9, MDV1A, and MDV1B. (FIG. 15D) Fold difference in eGFP mRNA expression from MDV1A compared to AAV9 in the brain and spinal cord of male and female 8 week old C57BL/6J and BALB/cJ mice injected with 1E+12 vg of MDV1A- or AAV9-CMV-eGFP. Dashed red line represents AAV9-CMV-eGFP expression normalized to 1. Data are represented as mean±SD (n=3-4); *p<0.05, **p<0.01 (Welch's t-test between MDV1A- and AAV9-injected mice with Holm-Šidák MCT). (FIG. 15E) Quantification of transgene delivery efficiency, expressed as vector genomes per diploid genome, of MDV1A- and AAV9-CMV-eGFP in the brain and spinal cord of 8 week old C57BL/6J and BALB/cJ mice injected with 1E+12 vg of MDV1A- or AAV9-CMV-eGFP. Data are represented as mean±SD (n=3-4); *p<0.05, **p<0.01 (Welch's t-test between MDV1A- and AAV9-injected mice with Holm-Šidák MCT). (FIG. 15F) Representative images of mouse brain sagittal sections immunostained for eGFP, from 8 week old C57BL/6J and BALB/cJ mice injected with 5E+11 vg of MDV1A- or AAV9-CMV-eGFP. Blue insets show magnified features in the cortex. Scale bar: 1 mm.

[0108] FIG. 16A-16D—The Proline Arginine Loop (PAL) family of neurotropic capsid variants in cynomolgus macaques emerges after selection with DELIVER (see also FIG. 19A-19C). (FIG. 16A) (SEQ ID NO: 200, 202, 204, 212, 218, 224, 228, 234) DNA sequence and corresponding peptide sequence logo of the 7-mer insert in the 10 most enriched DNA sequences of capsid variants in the central nervous system of cynomolgus macaques injected with 3E+13 vg/kg virus library following two rounds of selection with DELIVER. Sequences with the same color are encoded by synonymous DNA codons. (FIG. 16B) (SEQ ID NO: 200, 204, 286, 4005, 4357, 4593, 4599, 4601) Amino acid sequence and logo of the 7-mer insert in the 10 most enriched amino acid-level capsid variants in the macaque CNS. The rank of each variant corresponds to the sum of the ranks of two synonymous DNA sequences. (FIG. 16C—SEQ ID NO: 200, 204, 226, 234, 258, 260, 923, 1265, 2759, 3923, 4593, 4599, 4713, 5277, 5433, 5741, 5937, 6019)

[0109] FIG. 17A-17E. Macaque-derived variants outperform AAV9 and mouse- and marmoset-derived variants in transduction of the macaque but not the mouse central nervous system (see also FIG. 20A-20B). (FIG. 17A)(SEQ ID NO: 8596-8613) Pool of capsid variants injected for characterization of the top mouse- and macaque-derived neurotropic variants. (FIG. 17B) Schematic of the barcoded human frataxin transgene and strategy for assessing the performance of top variants in cynomolgus macaques and C57BL/6J and BALB/cJ mice. (FIG. 17C-17E) Fold difference in within-individual hFXN mRNA expression from different variants normalized to AAV9 in various tissues of (FIG. 17C) C57BL/6J mice, (D) BALB/cJ mice, and (E) cynomolgus macaques. Dashed red line represents AAV9-CBh-hFXN expression normalized to 1. Data are represented as mean±SD (n=3 macaques, n=4-7 mice); *p<0.05, **p<0.01 (one-way ANOVA with Dunnett's MCT and AAV9 as the control).

[0110] FIG. 18A-18H—Second-generation capsid variant PAL2 transduces the central nervous system of one macaque in a head-to-head experiment with AAV9. (FIG. 18A) Heatmap of PAL2 transgene mRNA expression and vector genome abundance normalized to AAV9. Data are log₂-transformed. (FIG. 18B) Immunostaining a coronal section of macaque brain hemisphere for the hFXN-HA transgene delivered by PAL2 suggests widespread and uniform transduction. Scale bar: 1 cm. (FIG. 18C-18E) Localization of hFXN-HA expression with respect to NeuN+ neurons in the macaque (FIG. 18C) parietal cortex, (FIG. 18D) hippocampus, and (FIG. 18E) spinal cord. Scale bars: 100 pm. (FIG. 18F) Localization of hFXN-HA expression with respect to rhodopsin+ photoreceptors in the macaque retina. Scale bars: 100 μm. (FIG. 18G) Representative spinal cord sections with pathology WNL (within normal limits). Scale bar: 200 μm. (FIG. 18H) Representative DRG sections with pathology WNL (within normal limits). Scale bar: 100 μm.

[0111] FIG. 19A-19C—Selection for capsid variants with neurotropic properties in cynomolgus macaques yields diverse families of motifs. (FIGS. 19A and 19B) Amino acid sequence and logo of the 7-mer insert in the 10 most enriched capsid variants in the (FIG. 19A) (SEQ ID NO: 260, 1069, 4665, 4751, 4909, 5013, 5107, 5191, 5287, 5401) cerebellum and (FIG. 19B) (SEQ ID NO: 224, 4759, 4971, 5091, 5127, 5165, 5177, 5181, 5187, 5189) spinal cord of cynomolgus macaques injected with 3E+13 vg/kg virus library following two rounds of selection with DELIVER. The rank of each variant corresponds to the sum of the ranks of two synonymous DNA sequences. (FIG. 19C) (SEQ ID NO: 971, 1077, 2439, 2529, 3103, 3283, 3553, 4605, 4619, 4629, 4825, 4933, 5131, 5209, 5233, 5341, 5367, 5461, 5547, 5631, 5633, 5731, 5959, 6001, 6045, 6139, 6169, 6497, 7335, 8033, 8269) Selected clusters of enriched variants in the macaque CNS with conserved sequence properties. Individual residues are color-coded according to their functional properties to highlight conserved aspects of the sequence motif. The rank of each variant corresponds to the sum of the ranks of two synonymous DNA sequences.

[0112] FIG. 20A-20B—PAL family capsid variants and other macaque-derived variants outperform AAV9 and mouse- and marmoset-derived variants in transduction of a variety of macaque brain regions. (FIG. 20A) Fold difference in within-individual hFXN mRNA expression from different variants normalized to AAV9 in various central nervous system tissues of cynomolgus macaques. Dashed red line represents AAV9-CBh-hFXN expression normalized to 1. Data are represented as mean±SD (n=3); *p<0.05, **p<0.01 (one-way ANOVA with Dunnett's MCT and AAV9 as the control). (FIG. 20B) Quantification of transgene delivery efficiency, expressed as vector genomes per diploid genome, of different variants in the macaque liver. Data are represented as mean±SD (n=3); *p<0.05, **p<0.01 (one-way ANOVA with Dunnett's MCT and AAV9 as the control).

[0113] The figures herein are for illustrative purposes only and are not necessarily drawn to scale.

### DETAILED DESCRIPTION OF THE EXAMPLE EMBODIMENTS

### General Definitions

[0114] Unless defined otherwise, technical and scientific terms used herein have the same meaning as commonly understood by one of ordinary skill in the art to which this disclosure pertains. Definitions of common terms and techniques in molecular biology may be found in Molecular Cloning: A Laboratory Manual, 2^{nd} edition (1989) (Sambrook, Fritsch, and Maniatis); Molecular Cloning: A Laboratory Manual, 4^{th} edition (2012) (Green and Sambrook); Current Protocols in Molecular Biology (1987) (F. M. Ausubel et al. eds.); the series Methods in Enzymology (Academic Press, Inc.): PCR 2: A Practical Approach (1995) (M. J. MacPherson, B. D. Hames, and G. R. Taylor eds.): Antibodies, A Laboratory Manual (1988) (Harlow and Lane, eds.): Antibodies A Laboratory Manual, 2^{nd} edition 2013 (E. A. Greenfield ed.); Animal Cell Culture (1987) (R.I. Freshney, ed.); Benjamin Lewin, Genes IX, published by Jones and Bartlet, 2008 (ISBN 0763752223); Kendrew et al. (eds.), The Encyclopedia of Molecular Biology, published by Blackwell Science Ltd., 1994 (ISBN 0632021829); Robert A. Meyers (ed.), Molecular Biology and Biotechnology: a Comprehensive Desk Reference, published by VCH Publishers, Inc., 1995 (ISBN 9780471185710); Singleton et al., Dictionary of Microbiology and Molecular Biology 2nd ed., J. Wiley & Sons (New York, N.Y. 1994), March, Advanced Organic Chemistry Reactions, Mechanisms and Structure 4th ed., John Wiley & Sons (New York, N.Y. 1992); and Marten H. Hofker and Jan van Deursen, Transgenic Mouse Methods and Protocols, 2^{nd} edition (2011).

[0115] As used herein, the singular forms “a”, “an”, and “the” include both singular and plural referents unless the context clearly dictates otherwise.

[0116] As used herein, “administering” refers to any suitable administration for the agent(s) being delivered and/or subject receiving said agent(s) and can be oral, topical, intravenous, subcutaneous, transcutaneous, transdermal, intramuscular, intra-joint, parenteral, intra-arteriole, intra-arterial, intrathecal, lumbar, subdural, intracisternal, subpial, subretinal, subconjunctival, intravitreal, intratympanic, intracochlear, intradermal, intraventricular, intraosseous, intraocular, intracranial, intraperitoneal, intralesional, intranasal, intracardiac, intraarticular, intracavemous, intrathecal, intravireal, intracerebral, and intracerebroventricular, intratympanic, intracochlear, rectal, vaginal, by inhalation, by catheters, stents or via an implanted reservoir or other device that administers, either actively or passively (e.g. by diffusion) a composition the perivascular space and adventitia. For example, a medical device such as a stent can contain a composition or formulation disposed on its surface, which can then dissolve or be otherwise distributed to the surrounding tissue and cells. The term “parenteral” can include subcutaneous, intravenous, intramuscular, intra-articular, intra-synovial, intrasternal, intrathecal, intrahepatic, intralesional, and intracranial injections or infusion techniques. Administration routes can be, for instance, auricular (otic), buccal, conjunctival, cutaneous, dental, electro-osmosis, endocervical, endosinusial, endotracheal, enteral, epidural, extra-amniotic, extracorporeal, hemodialysis, infiltration, interstitial, intra abdominal, intra-amniotic, intra-arterial, intra-articular, intrabiliary, intrabronchial, intrabursal, intracardiac, intracartilaginous, intracaudal, intracavemous, intracavitary, intracerebral, intracisternal, intracorneal, intracoronal (dental), intracoronary, intracorporus cavernosum, intradermal, intradiscal, intraductal, intraduodenal, intradural, intraepidermal, intraesophageal, intragastric, intragingival, intraileal, intralesional, intraluminal, intralymphatic, intramedullary, intrameningeal, intramuscular, intraocular, intraovarian, intrapericardial, intraperitoneal, intrapleural, intraprostatic, intrapulmonary, intrasinal, intraspinal, intrasynovial, intratendinous, intratesticular, intrathecal, intrathoracic, intratubular, intratumor, intratym panic, intrauterine, intravascular, intravenous, intravenous bolus, intravenous drip, intraventricular, intravesical, intravitreal, iontophoresis, irrigation, laryngeal, nasal, nasogastric, occlusive dressing technique, ophthalmic, oral, oropharyngeal, other, parenteral, percutaneous, periarticular, peridural, perineural, periodontal, rectal, respiratory (inhalation), retrobulbar, soft tissue, subarachnoid, subconjunctival, subcutaneous, sublingual, submucosal, topical, transdermal, transmucosal, transplacental, transtracheal, transtympanic, ureteral, urethral, and/or vaginal administration, and/or any combination of the above administration routes, which typically depends on the disease to be treated, subject being treated, and/or agent(s) being administered.

[0117] The term “optional” or “optionally” means that the subsequent described event, circumstance or substituent may or may not occur, and that the description includes instances where the event or circumstance occurs and instances where it does not.

[0118] The recitation of numerical ranges by endpoints includes all numbers and fractions subsumed within the respective ranges, as well as the recited endpoints.

[0119] The terms “about” or “approximately” as used herein when referring to a measurable value such as a parameter, an amount, a temporal duration, and the like, are meant to encompass variations of and from the specified value, such as variations of +/−10% or less, +/−5% or less, +/−1% or less, and +/−0.1% or less of and from the specified value, insofar such variations are appropriate to perform in the disclosed invention. It is to be understood that the value to which the modifier “about” or “approximately” refers is itself also specifically, and preferably, disclosed.

[0120] As used herein, a “biological sample” may contain whole cells and/or live cells and/or cell debris. The biological sample may contain (or be derived from) a “bodily fluid”. The present invention encompasses embodiments wherein the bodily fluid is selected from amniotic fluid, aqueous humour, vitreous humour, bile, blood serum, breast milk, cerebrospinal fluid, cerumen (earwax), chyle, chyme, endolymph, perilymph, exudates, feces, female ejaculate, gastric acid, gastric juice, lymph, mucus (including nasal drainage and phlegm), pericardial fluid, peritoneal fluid, pleural fluid, pus, rheum, saliva, sebum (skin oil), semen, sputum, synovial fluid, sweat, tears, urine, vaginal secretion, vomit and mixtures of one or more thereof. Biological samples include cell cultures, bodily fluids, cell cultures from bodily fluids. Bodily fluids may be obtained from a mammal organism, for example by puncture, or other collecting or sampling procedures.

[0121] The terms “subject,” “individual,” and “patient” are used interchangeably herein to refer to a vertebrate, preferably a mammal, more preferably a human. Mammals include, but are not limited to, murines, simians, humans, farm animals, sport animals, and pets. Tissues, cells and their progeny of a biological entity obtained in vivo or cultured in vitro are also encompassed.

[0122] Various embodiments are described hereinafter. It should be noted that the specific embodiments are not intended as an exhaustive description or as a limitation to the broader aspects discussed herein. One aspect described in conjunction with a particular embodiment is not necessarily limited to that embodiment and can be practiced with any other embodiment(s). Reference throughout this specification to “one embodiment”, “an embodiment,” “an example embodiment,” means that a particular feature, structure or characteristic described in connection with the embodiment is included in at least one embodiment of the present invention. Thus, appearances of the phrases “in one embodiment,” “in an embodiment,” or “an example embodiment” in various places throughout this specification are not necessarily all referring to the same embodiment, but may. Furthermore, the particular features, structures or characteristics may be combined in any suitable manner, as would be apparent to a person skilled in the art from this disclosure, in one or more embodiments. Furthermore, while some embodiments described herein include some but not other features included in other embodiments, combinations of features of different embodiments are meant to be within the scope of the invention. For example, in the appended claims, any of the claimed embodiments can be used in any combination.

[0123] All publications, published patent documents, and patent applications cited herein are hereby incorporated by reference to the same extent as though each individual publication, published patent document, or patent application was specifically and individually indicated as being incorporated by reference.

### Overview

[0124] Embodiments disclosed herein provide central nervous system (CNS)-specific targeting moieties that can be coupled to or otherwise associated with a cargo and/or delivery vehicle or system. Embodiments disclosed herein provide polypeptides (used interchangeably herein with the term “proteins”) and particles that can incorporate one or more of the CNS-specific targeting moieties. The polypeptides and/or particles can be coupled to, attached to, encapsulate, or otherwise incorporate a cargo, thereby associating the cargo with the targeting moiety(ies). Embodiments disclosed herein provide CNS-specific targeting moieties that contain one or more n-mer insert as further described herein. The targeting moieties may be used to provide engineered adeno-associated virus (AAV) capsids with a reprogrammed cell-specific and/or species-specific tropism, such as CNS specific tropism, to an engineered AAV particle.

[0125] In one example embodiment, the n-mer insert(s) is or contains a P-motif. In one example embodiment, the P-motif comprises the amino acid sequence XₘPX₁QGTX₂RXₙ (SEQ ID NO: 8580), wherein X₁, X₂, Xₘ, and Xₙ, are each independently selected from any amino acid, wherein m is 0, 1, 2, or 3, and wherein n is 0, 1, 2, 3, 4, 5, 6, or 7, and optionally a cargo, wherein the cargo is coupled to or is otherwise associated with the targeting moiety. In one example embodiment, the P-motif contains or is the amino acid sequence PX₁QGTX₂RXₙ (SEQ ID NO: 2), where X₁, X₂, Xₙ, are each selected from any amino acid and where n is 0, 1, 2, 3, 4, 5, 6, or 7.

[0126] In other example embodiments, the n-mer insert and/or P-motif is selected from the group consisting of SEQ ID NOs: 332-582 (Table 7).

[0127] In certain example embodiments, the targeting moiety comprises one or more n-mer inserts each comprising or consisting of a P-motif, wherein at least one of the P-motifs comprise the amino acid sequence XₘPX₁QGTX₂RXₙ (SEQ ID NO: 8580), wherein X₁, X₂, Xₘ, and Xₙ, are each independently selected from any amino acid, wherein m is 0, 1, 2, or 3, and wherein n is 0, 1, 2, 3, 4, 5, 6, or 7.

[0128] Embodiments disclosed herein also provide methods of generating recombinant AAVs (rAAVs) having engineered capsids that can involve systematically directing the generation of diverse libraries of variants of modified surface structures, such as variant capsid polypeptides. Embodiments of the method of generating rAAVs having engineered capsids can also include stringent selection of capsid variants capable of targeting CNS cells. As used in this context herein, “targeting” refers to the ability to, in a target specific manner, recognize, bind, associate with, transduce or infect, or otherwise interact with a target molecule or moiety such that recognition, binding, association, affinity, avidity, transduction or infection, and/or other interaction with the target molecule or moiety by the targeting moiety is greater, more efficient, or otherwise more selective for the target molecule or moiety as compared with its recognition, binding, association, affinity, avidity, transduction or infection, and/or other interaction with a non-target molecule or moiety. For example, a CNS-specific targeting moiety can have increased and/or more efficient or selective recognition, binding, association, affinity, avidity, transduction or infection, and/or other interaction of or with CNS cells as compared to non-CNS cells. In one example embodiment the n-mer may result in increased transduction of neurons of the CNS. Embodiments of the method of generating rAAVs having engineered capsids can include stringent selection of capsid variants capable of efficient and/or homogenous transduction in at least two or more species.

[0129] Embodiments disclosed herein provide vectors and systems thereof capable of producing an engineered AAV described herein.

[0130] Embodiments disclosed herein provide cells that can be capable of producing the engineered AAV particles described herein. In some embodiments, the cells include one or more vectors or system thereof described herein.

[0131] Embodiments disclosed herein provide engineered AAVs that can include an engineered capsid described herein. In some embodiments, the engineered AAV can include a cargo polynucleotide to be delivered to a cell. In some embodiments, the engineered AAV may be used to deliver gene therapies including encoding gene editing systems. In other embodiments, the engineered AAV may be used to deliver vaccines, such as DNA or mRNA vaccines.

[0132] Embodiments disclosed herein provide formulations that can contain an engineered AAV vector or system thereof, an engineered AAV capsid, engineered AAV particles including an engineered AAV capsid described herein, and/or an engineered cell described herein that contains an engineered AAV capsid, and/or an engineered AAV vector or system thereof. In some embodiments, the formulation can also include a pharmaceutically acceptable carrier. The formulations described herein can be delivered to a subject in need thereof or a cell.

[0133] Embodiments disclosed herein also provide kits that contain one or more of the one or more of the polypeptides, polynucleotides, vectors, engineered AAV capsids, engineered AAV particles, cells, or other components described herein and combinations thereof and pharmaceutical formulations described herein. In embodiments, one or more of the polypeptides, polynucleotides, vectors, engineered AAV capsids, engineered AAV particles cells, and combinations thereof described herein can be presented as a combination kit.

[0134] Embodiments disclosed herein provide methods of using the engineered AAVs having a cell-specific tropism described herein to deliver, for example, a therapeutic polynucleotide to a cell. In this way, the engineered AAVs described herein can be used to treat and/or prevent a disease in a subject in need thereof. Embodiments disclosed herein also provide methods of delivering the engineered AAV capsids, engineered AAV virus particles, engineered AAV vectors or systems thereof and/or formulations thereof to a cell. Also provided herein are methods of treating a subject in need thereof by delivering an engineered AAV particle, engineered AAV capsid, engineered AAV capsid vector or system thereof, an engineered cell, and/or formulation thereof to the subject.

[0135] Additional features and advantages of the embodiments engineered AAVs and methods of making and using the engineered AAVs are further described herein.

### CNS-Specific Targeting Moieties and Compositions

[0136] Generally, described herein are compositions containing one or more CNS-specific targeting moieties that can effectively target CNS cells. In some embodiments, the CNS-specific targeting moieties can be specific to one or more types of CNS cells. CNS cells include any cell within the brain, brain stem, spinal cord, inner ear, and eyes. In some embodiments, one or more CNS-specific targeting moieties can be incorporated into a delivery vehicle, agent, or system thereof so as to provide CNS specific targeting capability to the delivery vehicle, agent, or system thereof. Exemplary delivery vehicles include, without limitation, viral particles, (e.g., AAV viral particles), micelles, liposomes, exosomes, and the like. Exemplary delivery vehicles in which the CNS targeting-moieties can be incorporated are described in greater detail elsewhere herein. The CNS-targeting moieties may also be indirectly or directly coupled to a cargo and thus provide CNS specificity to the coupled cargo. In some embodiments, the composition can be specific for a CNS-cell (e.g., as conferred by the CNS-Specific targeting moieties described herein) and have reduced specificity for a non-CNS cell (including but not limited to a liver cell). In some embodiments, the CNS targeting moiety can specifically interact with or otherwise associate with one or more AAV receptors on CNS cells, thus providing CNS specificity (or tropism). Methods of generating and identifying CNS-specific targeting moieties are described in greater detail elsewhere herein.

### CNS-Specific Targeting Moieties

[0137] Described herein are targeting moieties capable of specifically targeting, binding, associating with, or otherwise interacting specifically with a CNS cell. In some embodiments, the targeting moiety effective to transduce, such as specifically transduce, a central nervous system (CNS) cell, comprises an n-mer insert optionally comprising or consisting of a P-motif, double valine motif, or both, and optionally a cargo, wherein the cargo is coupled to or is otherwise associated with the targeting moiety. Generally, n-mer inserts are short (e.g., about 3 to about 15, 20, or 25) amino acid sequences where each amino acid of the n-mer insert can be selected from any amino acid. In some embodiments, the n-mer insert is 3, 4, 5, 6, 7, 8, 9, 10, 11, 12, 13, 14, 15, 16, 17, 18, 19, 20, 21, 22, 23, 24, or 25 amino acids in length.

[0138] In certain example embodiments, where the targeting moiety comprises one or more n-mer inserts comprising or consisting of a P-motif, at least one of the P-motifs comprises or consists of the amino acid sequence XₘPX₁X₂GTX₃RXₙ (SEQ ID NO: 8579), wherein X₁, X₂, X₃, Xₘ, and Xₙ, are each independently selected from any amino acid, wherein m is 0, 1, 2, or 3, and wherein n is 0, 1, 2, 3, 4, 5, 6, or 7.

[0139] The term “P-motif” as used herein refers to an n-mer inserts that contains or is the amino acid sequence XₘPX₁X₂GTX₃RXₙ (SEQ ID NO: 8579), wherein X₁, X₂, X₃, Xₘ, and Xₙ, are each independently selected from any amino acid, wherein m is 0, 1, 2, or 3, and wherein n is 0, 1, 2, 3, 4, 5, 6, or 7. In some embodiments Xₘ is 2 and is AQ or DG. In some embodiments, the P-motif contains or is the amino acid sequence XₘPX₁QGTX₃RXₙ (SEQ ID NO: 8581), where X₁, X₃, Xₙ, are each selected from any amino acid, where m is 0, 1, 2, or 3, and where n is 0, 1, 2, 3, 4, 5, 6, or 7. In some embodiments, the P-motif contains or is the amino acid sequence PX₁QGTX₃RXₙ (SEQ ID NO: 2), where X₁, X₃, Xₙ, are each selected from any amino acid and where n is 0, 1, 2, 3, 4, 5, 6, or 7. n-mer inserts are described in greater detail elsewhere herein.

[0140] In certain example embodiments, the n-mer insert is or includes a double valine motif. As used herein the term “double valine motif” refers to an n-mer insert motif that has the amino acid sequence XₘX₁X₂VX₃X₄VX₅Xₙ, wherein X₁, X₂, X₃, Xₘ, and Xₙ, are each independently selected from any amino acid, wherein m is 0, 1, 2, or 3, and wherein n is 0, 1, 2, 3, 4, 5, 6, or 7.

[0141] In some embodiments, where an n-mer insert is or includes a P motif having the sequence amino acid sequence XₘPX₁X₂GTX₃RXₙ (SEQ ID NO: 8579) or XₘPX₁QGTX₃RXₙ (SEQ ID NO: 8581) or a double valine motif having the sequence XₘX₁X₂VX₃X₄VX₅Xₙ, and Xₘ in the P motif or double valine motif is not 0 (i.e., m=1, 2 or 3) the amino acids of Xₘ residues of the motif can replace up to 1, 2, or 3, respectively amino acids of the polypeptide into which the n-mer insert is being incorporated, such as a targeting moiety (e.g., a polypeptide, viral polypeptide, viral capsid polypeptide, and/or the like). Incorporation of an n-mer insert in this manner can position a P motif or double valine motif as an “insertion” between any two desired contiguous amino acids of the recipient polypeptide.

[0142] In some embodiments, the two amino acid residues immediately preceding the n-mer insert are AQ or DG in a targeting moiety or a composition that is a polypeptide. In some embodiments, where Xₘ is 0, the two amino acid residues in the targeting moiety immediately preceding the P-motif or double valine motif are AQ or DG.

[0143] In some embodiments, Xₙ of the P-motif or double valine motif is 0. In some embodiments, Xₙ of the P-motif or double valine motif is 1. In some embodiments, Xₙ of the P-motif or double valine motif is 2. In some embodiments, Xₙ of the P-motif or double valine motif is 3. In some embodiments, Xₙ of the P-motif or double valine motif is 4. In some embodiments, Xₙ of the P-motif or double valine motif is 5. In some embodiments, Xₙ of the P-motif or double valine motif is 6. In some embodiments, Xₙ of the P-motif or double valine motif is 7. In some embodiments, Xₘ of the P-motif or double valine motif is 0. In some embodiments, Xₘ of the P motif or double valine motif is 3. In some embodiments, Xₘ of the P motif or double valine motif is 2. In some embodiments, Xₘ of the P motif or double valine motif is 1.

[0144] In certain example embodiments, X₂ of the P motif is Q, P, E, or H. In certain example embodiments, X₁ of the P motif is a polar amino acid, optionally a polar uncharged amino acid. In certain example embodiments, X₃ of the P motif is a nonpolar amino acid. In certain example embodiments, X₁ of the P motif is S, T, N, Q, C, Y or A, X₂ of the P motif is Q, P, E, or H, X₃ is G, A, M, W, L, V, F, or I, or any combination thereof.

[0145] In certain example embodiments, X₁ of the double valine motif is R, K, V, or W. In certain example embodiments, X₂ of the double valine motif is T, S, V, Y or R. In certain example embodiments, X₃ of the double valine motif is G, P, or S. In certain example embodiments, X₄ of the double valine motif is S, D, or T. In certain example embodiments, X₅ of the double valine motif is Y, G, S, or L.

[0146] In some embodiments, Xₙ of the n-mer insert is 0. In some embodiments, the CNS-specific n-ner motif is as in any of Tables 1-3. In some embodiments, the CNS-specific n-mer insert is any one of the n-mer inserts in Table 6 (SEQ ID NOs.: 321-329). In some embodiments the CNS-specific n-mer insert is any one or more of the n-mer inserts selected from the group of SEQ ID NOs.: 322-324. In some embodiments the CNS-specific n-mer insert is any one or more of the n-mer inserts selected from the group of SEQ ID NOs.: 322-325. In some embodiments the CNS-specific n-mer insert is any one or more of the n-mer inserts selected from the group of SEQ ID NOs.: 322-327. In some embodiments the CNS-specific n-mer insert is any one or more of the n-mer inserts selected from the group of SEQ ID NOs.: 322-324 and 329. In some embodiments the CNS-specific n-mer insert and/or P-motif is any one or more of the n-mer inserts selected from the group of SEQ ID NOs.: 322-324. In some embodiments the CNS-specific n-mer insert any one or more of the n-mer inserts selected from the group of SEQ ID NOs.: 322-324 and 326-327. In some embodiments the CNS-specific n-mer insert is any one or more of the n-mer inserts selected from the group of SEQ ID NOs.: 322-324 and 326-328. In some embodiments the CNS-specific n-mer insert and is any one or more of the n-mer inserts selected from the group of SEQ ID NOs.: 322-324 and 328.

[0147] In certain example embodiments, at least one P-motif is selected from any one of SEQ ID NOs: 332-582 (Table 7).

[0148] In some embodiments, the n-mer insert(s) and/or at least one P-motif and/or double valine motif is selected from any one n-mer insert and/or is encoded by a polynucleotide as set forth in Table 8 (SEQ ID NOs: 583-8578). In some embodiments, the n-mer insert(s) and/or at least one P-motif and/or double valine motif is selected from any one n-mer insert and/or is encoded by a polynucleotide having a sequence according to any one of SEQ ID NOs: 583-2582. In some embodiments, the n-mer insert(s) and/or at least one P-motif and/or double valine motif is selected from any one n-mer insert and/or is encoded by a polynucleotide having a sequence according to any one of SEQ ID NOs: 2583-4582. In some embodiments, the n-mer insert(s) and/or at least one P-motif and/or double valine motif is selected from any one n-mer insert and/or is encoded by a polynucleotide having a sequence according to any one of SEQ ID NOs: 4583-6578. In some embodiments, the n-mer insert(s) and/or at least one P-motif and/or double valine motif is selected from any one n-mer insert and/or is encoded by a polynucleotide having a sequence according to any one of SEQ ID NOs: 6579-8578.

[0149] In certain example embodiments, the n-mer insert(s) and/or at least one P-motif and/or double valine motif is selected from any one n-mer insert and/or is encoded by a polynucleotide as set forth in one or more of SEQ ID NOs: 332-582 (Table 7), SEQ ID NOs: 583-8578 (Table 8), SEQ ID NOs: 3-819, 21-22, 24, 200, 202, 204, 212, 218, 224, 226, 228, 286, 234, 258, 260, 647, 649, 923, 1069, 1077, 1265, 2439, 2529, 2759, 3283, 3553, 3923, 4005, 4173, 4537, 4593, 4599, 4601, 4605, 4619, 4665, 4751, 4759, 4825, 4909, 4933, 5013, 5091, 5107, 5127, 5131, 5165, 5177, 5181, 5187, 5189, 5191, 5277, 5287, 5401, 5433, 5631, 5633, 5731, 5741, 5937, 6019, 6045, 6139, 6169, 6497, 7335, 8033, 8269, 8596-8613, (FIGS. 15A, 15B, 17A, 16A, 16B, 16C, and 19A-19C).

[0150] In some embodiments, the CNS-specific n-mer motif is and/or is encoded by a polynucleotide in FIG. 15A (SEQ ID NOs. 3-8).

[0151] In some embodiments, the CNS-specific n-mer motif is and/or is encoded by a polynucleotide in FIG. 15B (SEQ ID NOs. 19, 21-22, 24, 647, 649).

[0152] In some embodiments, the CNS-specific n-mer motif is and/or is encoded by a polynucleotide in FIG. 16A (SEQ ID NOs. 200, 202, 204, 212, 218, 224, 228, 234).

[0153] In some embodiments, the CNS-specific n-mer motif is and/or is encoded by a polynucleotide in FIG. 16B (SEQ ID NOs. 200, 204, 286, 4005, 4537, 4593, 4599, 4601).

[0154] In some embodiments, the CNS-specific n-mer motif is and/or is encoded by a polynucleotide in FIG. 16C (SEQ ID NOs. 200, 204, 226, 234, 258, 260, 923, 1265, 2759, 3923, 4173, 4593, 4599, 5277, 5433, 5741, 5937, 6019).

[0155] In some embodiments, the CNS-specific n-mer motif is and/or is encoded by a polynucleotide in FIG. 17A (SEQ ID NOs. 8596-8613).

[0156] In some embodiments, the CNS-specific n-mer motif is and/or is encoded by a polynucleotide in FIG. 19A (SEQ ID NOs. 260, 1069, 4665, 4751, 4909, 5013, 5107, 5191, 5287, 5401).

[0157] In some embodiments, the CNS-specific n-mer motif is and/or is encoded by a polynucleotide in FIG. 19B (SEQ ID NOs. 224, 4759, 4971, 5091, 5127, 5165, 5177, 5181, 5187, 5189).

[0158] In some embodiments, the CNS-specific n-mer motif is and/or is encoded by a polynucleotide in FIG. 19C (SEQ ID NOs: 2439, 2529, 3103, 3283, 3553, 4605, 4619, 4825, 4933, 5131, 5631, 5731, 6001, 971, 4629, 5209, 5233, 5341, 5367, 5461, 5547, 5959, 6045, 6139, 1077, 7335, 8033, 8269, 5633, 6169, 6497). In some embodiments, the CNS-specific n-mer motif is and/or is encoded by a polynucleotide having a sequence according to any one of SEQ ID NOs: 2439, 2529, 3103, 3283, 3553, 4605, 4619, 4825, 4933, 5131, 5631, 5731, 6001. In some embodiments, the CNS-specific n-mer motif is and/or is encoded by a polynucleotide having a sequence according to any one of SEQ ID NOs: 971, 4629, 5209, 5233, 5341, 5367, 5461, 5547, 5959, 6045, 6139. In some embodiments, the CNS-specific n-mer motif is and/or is encoded by a polynucleotide having a sequence according to any one of SEQ ID NOs: 1077, 7335, 8033, 8269, 5633, 6169, 6497.

[0159] In some embodiments, the CNS-specific n-mer insert is species specific. In other words, in some embodiments, the CNS-specific n-mer insert can facilitate CNS targeting in one species better than another species. In some embodiments the CNS-specific n-mer insert is specific for primates. In some embodiments, the CNS-specific n-mer insert is specific for human and/or non-human primates.

[0160] In some embodiments, the CNS-specific n-mer insert is capable of targeting one or more cell and/or tissue types over others within the CNS. In some embodiments, the CNS-specific insert is not effective or is less effective at targeting the dorsal root ganglion cells than one or more other cells and/or tissue types of the CNS.

[0161] In some embodiments, the CNS-specific n-mer insert is capable of targeting a specific CNS tissue type or cell type. In some embodiments, the CNS-specific n-mer insert is capable of targeting one or more specific regions of the CNS as set forth in Table 9. n some embodiments, the CNS-specific n-mer insert is capable of targeting the frontal lobe, the temporal lobe or specific region thereof (e.g., the posterior or anterior temporal lobe), the parietal lobe or specific region thereof (e.g., the posterior or anterior parietal lobe), the occipital lobe the thalamus, the corpus callosum, the cerebellum, neuroretina, RPE, brain stem, the spinal cord or a region therein (e.g., the cervical spinal cord, the thoracic spinal cord, the lumbar spinal cord), cauda equina, DRGs or subset thereof (e.g., cervical DRG, thoracic DRG, lumbar DRG), or any combination thereof.

[0162] In some embodiments, the targeting moiety can include more than one n-mer inserts, such as a CNS-specific n-mer insert described herein. In some embodiments, the targeting moiety can include 1, 2, 3, 4, 5, 6, 7, 8, 9, 10 or more n-mer inserts. In some embodiments, all the n-motifs included in the targeting moiety can be the same. In some embodiments where more than one n-mer insert is included, at least two of the n-mer inserts are different from each other. In some embodiments where more than one n-mer insert is included, all the n-mer inserts are different from each other.

[0163] In one example embodiment, the targeting moiety, e.g., the CNS-specific targeting moiety, can be coupled to or otherwise associated with a cargo. In some embodiments, one or more CNS-specific targeting moieties described herein is directly attached to the cargo. In some embodiments, one or more CNS-specific targeting moieties described herein is indirectly coupled to the cargo, such as via a linker molecule.

[0164] In another example embodiment, one or more CNS-specific targeting moieties described herein is coupled to associated with a particle that is coupled to, attached to, encapsulates, and/or contains a cargo. Exemplary particles include, without limitation, viral particles (e.g., viral capsids, which is inclusive of bacteriophage capsids), polysomes, liposomes, nanoparticles, microparticles, exosomes, micelles, and the like. The term “nanoparticle” as used herein includes a nanoscale deposit of a homogenous or heterogeneous material. Nanoparticles may be regular or irregular in shape and may be formed from a plurality of co-deposited particles that form a composite nanoscale particle. Nanoparticles may be generally spherical in shape or have a composite shape formed from a plurality of co-deposited generally spherical particles. Exemplary shapes for the nanoparticles include, but are not limited to, spherical, rod, elliptical, cylindrical, disc, and the like. In some embodiments, the nanoparticles have a substantially spherical shape.

[0165] As used herein, the term “specific” when used in relation to described an interaction between two moieties, refers to non-covalent physical association of a first and a second moiety wherein the association between the first and second moieties is at least 2 times as strong, at least 5 times as strong as, at least 10 times as strong as, at least 50 times as strong as, at least 100 times as strong as, or stronger than the association of either moiety with most or all other moieties present in the environment in which binding occurs. Binding of two or more entities may be considered specific if the equilibrium dissociation constant, Kd, is 10⁻³ M or less, 10⁻⁴ M or less, 10⁻⁵ M or less, 10⁻⁶ M or less, 10⁻⁷ M or less, 10⁻⁸ M or less, 10⁻⁹ M or less, 10⁻¹⁰ M or less, 10⁻¹¹ M or less, or 10⁻¹² M or less under the conditions employed, e.g., under physiological conditions such as those inside a cell or consistent with cell survival. In some embodiments, specific binding can be accomplished by a plurality of weaker interactions (e.g., a plurality of individual interactions, wherein each individual interaction is characterized by a Kd of greater than 10⁻³ M). In some embodiments, specific binding, which can be referred to as “molecular recognition,” is a saturable binding interaction between two entities that is dependent on complementary orientation of functional groups on each entity. Examples of specific interactions include primer-polynucleotide interaction, aptamer-aptamer target interactions, antibody-antigen interactions, avidin-biotin interactions, ligand-receptor interactions, metal-chelate interactions, hybridization between complementary nucleic acids, etc.

[0166] In some embodiments, in addition to the n-mer insert(s) the targeting moiety can include a polypeptide, a polynucleotide, a lipid, a polymer, a sugar, or a combination thereof.

[0167] In some embodiments, the targeting moiety is incorporated into a viral polypeptide, such as a capsid polypeptide, including but not limited to lentiviral, adenoviral, AAV, bacteriophage, and retroviral polypeptides. In some embodiments, the n-mer insert is inserted between two amino acids of the viral polypeptide such that the n-mer insert is external (i.e., is presented on the surface of) to a viral capsid.

[0168] In some embodiments, the composition containing one or more of the CNS-specific targeting moieties described herein has increased muscle cell potency, muscle cell specificity, reduced immunogenicity, or any combination thereof.

[0169] Cargos can include any molecule that is capable of being coupled to or associated with the CNS-specific targeting moieties described herein. Cargos can include, without limitation, nucleotides, oligonucleotides, polynucleotides, amino acids, peptides, polypeptides, riboproteins, lipids, sugars, pharmaceutically active agents (e.g., drugs, imaging and other diagnostic agents, and the like), chemical compounds, and combinations thereof. In some embodiments, the cargo is DNA, RNA, amino acids, peptides, polypeptides, antibodies, aptamers, ribozymes, guide sequences for ribozymes that inhibit translation or transcription of essential tumor proteins and genes, hormones, immunomodulators, antipyretics, anxiolytics, antipsychotics, analgesics, antispasmodics, anti-inflammatories, anti-histamines, anti-infectives, radiation sensitizers, chemotherapeutics, radioactive compounds, imaging agents, and combinations thereof.

[0170] The CNS-specific targeting moieties can be encoded in whole or in part by a polynucleotide. The encoding polynucleotides can be included in one or more vectors (or vector systems) that can be used to generate targeting moieties and compositions thereof that include the CNS-specific n-mer insert(s) Exemplary encoding polynucleotides, vectors, vector systems, and recombinant engineering techniques are described in greater detail herein and/or are generally known in the art and can be adapted for use with the targeting moieties and compositions thereof described herein.

[0171] In some embodiments, the cargo is capable of treating or preventing a CNS disease or disorder. Exemplary CNS diseases and disorders are described elsewhere herein.

### Cargos

[0172] Representative cargo molecules that may be delivered using the compositions disclosed herein include, but are not limited to, nucleic acids, polynucleotides, proteins, polypeptides, polynucleotide/polypeptide complexes, small molecules, sugars, or a combination thereof. Cargos that can be delivered in accordance with the systems and methods described herein include, but are not necessarily limited to, biologically active agents, including, but not limited to, therapeutic agents, imaging agents, and monitoring agents. A cargo may be an exogenous material or an endogenous material. In some embodiments, the cargo can be a “gene of interest”.

[0173] In some embodiments the cargos, in addition to the cargo of interest that is to be delivered to a CNS cell, the cargo contains one or more binding sites specific for one or more RNAi molecules that are endogenous to one or more non-target (such as non-CNS cells). In this context herein “non-target cells” refers to cells to which delivery or activity of a cargo is not desired. In other words, “non-target cells” are cells in which the targeting moiety, such as the CNS specific targeting moiety, and compositions thereof do not specifically target. When a cargo having one more specific binding sites for one or more RNAi molecules that are endogenous to one or more non-target cells is delivered to non-target cells, the endogenous RNAi molecule of the non-target cell degrades the cargo molecule via the endogenous RNAi pathway. In this way off-target toxicity or other deleterious off-target events can be reduced. This can also be referred to as a mechanism of detargeting the composition to non-target cells.

[0174] In some embodiments, the detargeting component of a cargo molecule is one or more specific binding sites for one or more RNAi molecules that are endogenous to one or more non-target cells. In some embodiments, the RNAi molecules that are endogenous to one or more non-target cells are specifically expressed in those non-target cell(s). In some embodiments, the RNAi molecules that are endogenous to one or more non-target cells are enriched or have greater expression in non-target cell(s) as compared to target cells, such as CNS cells. In some embodiments, the more RNAi molecules that are endogenous to one or more non-target cells are not expressed in a target cell, such as a CNS cell. Exemplary RNAi molecule types are described elsewhere herein. In some embodiments, the one or more RNAi molecules that are endogenous to one or more non-target cells are microRNAs. In some embodiments, the non-target cell(s) are liver cell(s) and/or dorsal root ganglion neuron(s). In some embodiments, the RNAi molecules are miR183, miR-182, miR122, miR122a, miR99a, miR-26a, miR199a, miRNA-143, miR101a, miR-30c, or any combination thereof.

[0175] Other exemplary detargeting RNAi molecules are described in e.g., International Patent Application Pub. WO2021231579A1 and WO2020132455A1, https://www-hebertpub-com.ezp-prod1.hul.harvard.edu/doi/pdf/10.1089%2Fnat.2015.0543.

### Polynucleotides

[0176] In some embodiments, the cargo is a cargo polynucleotide. As used herein, “nucleic acid,” “nucleotide sequence,” and “polynucleotide” can be used interchangeably herein and can generally refer to a string of at least two base-sugar-phosphate combinations and refers to, among others, single- and double-stranded DNA, DNA that is a mixture of single- and double-stranded regions, single- and double-stranded RNA, and RNA that is mixture of single- and double-stranded regions, hybrid molecules comprising DNA and RNA that may be single-stranded or, more typically, double-stranded or a mixture of single- and double-stranded regions. In addition, polynucleotide as used herein can refer to triple-stranded regions comprising RNA or DNA or both RNA and DNA. The strands in such regions can be from the same molecule or from different molecules. The regions may include all of one or more of the molecules, but more typically involve only a region of some of the molecules. One of the molecules of a triple-helical region often is an oligonucleotide. “Polynucleotide” and “nucleic acids” also encompasses such chemically, enzymatically, or metabolically modified forms of polynucleotides, as well as the chemical forms of DNA and RNA characteristic of viruses and cells, including simple and complex cells, inter alia. For instance, the term polynucleotide as used herein can include DNAs or RNAs as described herein that contain one or more modified bases. Thus, DNAs or RNAs including unusual bases, such as inosine, or modified bases, such as tritylated bases, to name just two examples, are polynucleotides as the term is used herein. “Polynucleotide”, “nucleotide sequences” and “nucleic acids” also includes PNAs (peptide nucleic acids), phosphorothioates, and other variants of the phosphate backbone of native nucleic acids. Natural nucleic acids have a phosphate backbone, artificial nucleic acids can contain other types of backbones, but contain the same bases. Thus, DNAs or RNAs with backbones modified for stability or for other reasons are “nucleic acids” or “polynucleotides” as that term is intended herein. As used herein, “nucleic acid sequence” and “oligonucleotide” also encompasses a nucleic acid and polynucleotide as defined elsewhere herein.

[0177] As used herein, “deoxyribonucleic acid (DNA)” and “ribonucleic acid (RNA)” can generally refer to any polyribonucleotide or polydeoxyribonucleotide, which may be unmodified RNA or DNA or modified RNA or DNA. RNA can be in the form of non-coding RNA, including but not limited to, tRNA (transfer RNA), snRNA (small nuclear RNA), rRNA (ribosomal RNA), anti-sense RNA, RNAi (RNA interference construct), siRNA (short interfering RNA), microRNA (miRNA), or ribozymes, aptamers, guide RNA (gRNA), or coding mRNA (messenger RNA).

[0178] In some embodiments, the cargo polynucleotide is DNA. In some embodiments, the cargo polynucleotide is RNA. In some embodiments, the cargo polynucleotide is a polynucleotide (a DNA or an RNA) that encodes an RNA and/or a polypeptide. As used herein with reference to the relationship between DNA, cDNA, cRNA, RNA, protein/peptides, and the like “corresponding to” or “encoding” (used interchangeably herein) refers to the underlying biological relationship between these different molecules. As such, one of skill in the art would understand that operatively “corresponding to” can direct them to determine the possible underlying and/or resulting sequences of other molecules given the sequence of any other molecule which has a similar biological relationship with these molecules. For example, from a DNA sequence an RNA sequence can be determined and from an RNA sequence a cDNA sequence can be determined.

### Genes of Interest

[0179] In some embodiments, the systems described herein comprise a polynucleotide encoding a gene of interest. As used herein, the term “gene of interest” refers to the gene selected for a particular purpose and being desired of delivery by a system or vesicle of the present invention. A gene of interest inserted into one or more regions a vector, such as an expression vector (including one or more of the engineered delivery vesicle generation system vectors) such that when expressed in a target cell or recipient cell it can be expressed and produce a desired gene product and/or be packaged as cargo in an engineered delivery vesicle of the present invention. It will be appreciated that other cargos specifically identified can also be genes of interest. For example, a polynucleotide encoding a Cas effector can be a gene of interest in this context where it is desired to deliver a Cas effector to a cell, for example.

[0180] In one embodiment, the gene of interest encodes a gene that provides a therapeutic function for the treatment of a disease. In some embodiments, the gene of interest can also be a vaccinating gene, that is to say a gene encoding an antigenic peptide that is capable of generating an immune response in humans or animals. This may include, but is not necessarily limited to, peptide antigens specific for viral and bacterial infections, or may be tumor-specific. In some embodiments, a gene of interest is a gene which confers a desired phenotype. As the embodiments described herein focus on improved methods for packaging and delivery of a gene of interest, the particular gene of interest is not limiting and the technology can generally be used to deliver any gene of interest generally recognized by one of ordinary skill in the art as deliverable using a lentiviral system. One skilled in the art can design a construct containing any gene that they are interested in. Designing a construct containing a known gene of interest can be performed without undue experimentation. One of ordinary skill in the art routinely selects genes of interest. For example, the GenBank public database has existed since 1982 and is routinely used by persons of ordinary skill in the art relevant to the presently claimed method. As of June 2019, GenBank contains 2013,383,758 loci, 329,835,282,370 bases, from 213,383,758 reported sequences. The nucleotide sequences are from more than 300,000 organisms with supporting bibliographic and biological annotation. GenBank is only example, as there are many other known repositories of sequence information.

[0181] In some embodiments, the gene of interest may be, for example, a synthetic RNA/DNA sequence, a codon optimized RNA/DNA sequence, a recombinant RNA/DNA sequence (i.e., prepared by use of recombinant DNA techniques), a cDNA sequence or a partial genomic DNA sequence, including combinations thereof. Preferably, this is in the sense orientation. Preferably, the sequence is, comprises, or is transcribed from cDNA. The gene(s) of interest may also be referred to herein as “heterologous sequence(s)” “heterologous gene(s)” or “transgene(s)”.

[0182] In some embodiments, the gene of interest may confer some therapeutic benefit. The terms “therapeutic agent”, “therapeutic capable agent” or “treatment agent” are used interchangeably and refer to a molecule or compound that confers some beneficial effect upon administration to a subject. The beneficial effect includes enablement of diagnostic determinations; amelioration of a disease, symptom, disorder, or pathological condition; reducing or preventing the onset of a disease, symptom, disorder, or condition; and generally counteracting a disease, symptom, disorder or pathological condition.

[0183] Preferably, the therapeutic agent may be administered in a therapeutically effective amount of the active components. The term “therapeutically effective amount” refers to an amount which can elicit a biological or medicinal response in a tissue, system, animal, or human that is being sought by a researcher, veterinarian, medical doctor or other clinician, and in particular can prevent or alleviate one or more of the local or systemic symptoms or features of a disease or condition being treated. In some embodiments, the disease or condition is a disease or condition of or affecting the CNS or cell thereof. Exemplary diseases and disorders of and/or affecting the CNS are described in greater detail elsewhere herein.

[0184] In some embodiments, the gene of interest may lead to altered expression in the target cell. As used herein the term “altered expression” may particularly denote altered production of the recited gene products by a cell. As used herein, the term “gene product(s)” includes RNA transcribed from a gene (e.g., mRNA), or a polypeptide encoded by a gene or translated from RNA.

[0185] Also, “altered expression” as intended herein may encompass modulating the activity of one or more endogenous gene products. Accordingly, “altered expression”, “altering expression”, “modulating expression”, or “detecting expression” or similar may be used interchangeably with respectively “altered expression or activity”, “altering expression or activity”, “modulating expression or activity”, or “detecting expression or activity” or similar. As used herein, “modulating” or “to modulate” generally means either reducing or inhibiting the activity of a target or antigen, or alternatively increasing the activity of the target or antigen, as measured using a suitable in vitro, cellular, or in vivo assay. In particular, “modulating” or “to modulate” can mean either reducing or inhibiting the (relevant or intended) activity of, or alternatively increasing the (relevant or intended) biological activity of the target or antigen, as measured using a suitable in vitro, cellular or in vivo assay (which will usually depend on the target or antigen involved), by at least 5%, at least 10%, at least 25%, at least 50%, at least 60%, at least 70%, at least 80%, or 90% or more, compared to activity of the target or antigen in the same assay under the same conditions but without the presence of the inhibitor/antagonist agents or activator/agonist agents described herein.

[0186] As will be clear to the skilled person, “modulating” can also involve effecting a change (which can either be an increase or a decrease) in affinity, avidity, specificity and/or selectivity of a target or antigen, for one or more of its targets compared to the same conditions but without the presence of a modulating agent. Again, this can be determined in any suitable manner and/or using any suitable assay known per se, depending on the target. In particular, an action as an inhibitor/antagonist or activator/agonist can be such that an intended biological or physiological activity is increased or decreased, respectively, by at least 5%, at least 10%, at least 25%, at least 50%, at least 60%, at least 70%, at least 80%, or 90% or more, compared to the biological or physiological activity in the same assay under the same conditions but without the presence of the inhibitor/antagonist agent or activator/agonist agent. Modulating can also involve activating the target or antigen or the mechanism or pathway in which it is involved.

### Interference RNAs

[0187] In certain example embodiments, the one or more polynucleotides, such as cargo polynucleotides, may encode one or more interference RNAs. Interference RNAs are RNA molecules capable of suppressing gene expressions. Example types of interference RNAs include small interfering RNA (siRNA), micro RNA (miRNA), and short hairpin RNA (shRNA). It will be appreciated that a cargo can include an RNAi molecule to be delivered to a target cell as well as a binding site for an endogenous RNAi molecule of a non-target cell. RNAi molecules that are to be delivered to a target cell as cargo can be e.g., therapeutic.

[0188] In certain example embodiments, the interference RNA may be a siRNAs. Small interfering RNA (siRNA) molecules are capable of inhibiting target gene expression by interfering RNA. siRNAs may be chemically synthesized, or may be obtained by in vitro transcription, or may be synthesized in vivo in target cell. siRNAs may comprise double-stranded RNA from 15 to 40 nucleotides in length and can contain a protuberant region 3′ and/or 5′ from 1 to 6 nucleotides in length. Length of protuberant region is independent from total length of siRNA molecule. siRNAs may act by post-transcriptional degradation or silencing of target messenger. In some cases, the exogenous polynucleotides encode shRNAs. In shRNAs, the antiparallel strands that form siRNA are connected by a loop or hairpin region.

[0189] The RNAi molecules delivered as cargo can, in some embodiments, suppress expression of genes and/or degrade a gene product (e.g., a transcript) related to a CNS disease, eye disease, or inner ear disease. Therefore, in some embodiments, the RNAi cargo treats or prevents a CNS disease, eye disease, or inner ear disease or symptom thereof.

[0190] The interference RNA (e.g., siRNA) may suppress expression of genes to promote long term survival and functionality of cells after transplanted to a subject. In some examples, the interference RNAs suppress genes in TGFβ pathway, e.g., TGFβ, TGFβ receptors, and SMAD proteins. In some examples, the interference RNAs suppress genes in colony-stimulating factor 1 (CSF1) pathway, e.g., CSF1 and CSF1 receptors. In certain embodiments, the one or more interference RNAs suppress genes in both the CSF1 pathway and the TGFβ pathway. TGFβ pathway genes may comprise one or more of ACVR1, ACVR1C, ACVR2A, ACVR2B, ACVRL1, AMH, AMHR2, BMP2, BMP4, BMP5, BMP6, BMP7, BMP8A, BMP8B, BMPR1A, BMPR1B, BMPR2, CDKN2B, CHRD, COMP, CREBBP, CUL1, DCN, E2F4, E2F5, EP300, FST, GDF5, GDF6, GDF7, ID1, ID2, ID3, ID4, IFNG, INHBA, INHBB, INHBC, INHBE, LEFTY1, LEFTY2, LOC728622, LTBP1, MAPK1, MAPK3, MYC, NODAL, NOG, PITX2, PPP2CA, PPP2CB, PPP2R1A, PPP2R1B, RBL1, RBL2, RBX1, RHOA, ROCK1, ROCK2, RPS6KB1, RPS6KB2, SKP1, SMAD1, SMAD2, SMAD3, SMAD4, SMAD5, SMAD6, SMAD7, SMAD9, SMURF1, SMURF2, SP1, TFDP1, TGFB1, TGFB2, TGFB3, TGFBR1, TGFBR2, THBS1, THBS2, THBS3, THBS4, TNF, ZFYVE16, and/or ZFYVE9.

[0191] In some embodiments, the cargo polynucleotide is an RNAi molecule, antisense molecule, and/or a gene silencing oligonucleotide or a polynucleotide that encodes an RNAi molecule, antisense molecule, and/or gene silencing oligonucleotide.

[0192] As used herein, “gene silencing oligonucleotide” refers to any oligonucleotide that can alone or with other gene silencing oligonucleotides utilize a cell's endogenous mechanisms, molecules, proteins, enzymes, and/or other cell machinery or exogenous molecule, agent, protein, enzyme, and/or polynucleotide to cause a global or specific reduction or elimination in gene expression, RNA level(s), RNA translation, RNA transcription, that can lead to a reduction or effective loss of a protein expression and/or function of a non-coding RNA as compared to wild-type or a suitable control. This is synonymous with the phrase “gene knockdown” Reduction in gene expression, RNA level(s), RNA translation, RNA transcription, and/or protein expression can range from about 100, 99, 98, 97, 96, 95, 94, 93, 92, 91, 90, 89, 88, 87, 86, 85, 84, 83, 82, 81, 80, 79, 78, 77, 76, 75, 74, 73, 72, 71, 70, 69, 68, 67, 66, 65, 64, 63, 62, 61, 60, 59, 58, 57, 56, 55, 54, 53, 52, 51, 50, 49, 48, 47, 46, 45, 44, 43, 42 41, 40, 39, 38, 37, 36, 35, 34, 33, 32, 31, 30, 29, 28, 27, 26, 25, 24, 23, 22, 21, 20, 19, 18, 17, 16, 15, 14, 13, 12, 11, 10, 9, 8, 7, 6, 5, 4, 3, 2, to 1% or less reduction. “Gene silencing oligonucleotides” include, but are not limited to, any antisense oligonucleotide, ribozyme, any oligonucleotide (single or double stranded) used to stimulate the RNA interference (RNAi) pathway in a cell (collectively RNAi oligonucleotides), small interfering RNA (siRNA), microRNA, and short-hairpin RNA (shRNA). Commercially available programs and tools are available to design the nucleotide sequence of gene silencing oligonucleotides for a desired gene, based on the gene sequence and other information available to one of ordinary skill in the art.

### Therapeutic Polynucleotides

[0193] In some embodiments, the cargo molecule is a therapeutic polynucleotide. Therapeutic polynucleotides are those that provide a therapeutic effect when delivered to a recipient cell. The polynucleotide can be a toxic polynucleotide (a polynucleotide that when transcribed or translated results in the death of the cell) or polynucleotide that encodes a lytic peptide or protein. In embodiments, delivery vesicles having a toxic polynucleotide as a cargo molecule can act as an antimicrobial or antibiotic. This is discussed in greater detail elsewhere herein. In some embodiments, the cargo molecule can be exogenous to the producer cell and/or a first cell. In some embodiments, the cargo molecule can be endogenous to the producer cell and/or a first cell. In some embodiments, the cargo molecule can be exogenous to the recipient cell and/or a second cell. In some embodiments, the cargo molecule can be endogenous to the recipient cell and/or second cell.

[0194] As described herein the cargo polynucleotide can be any polynucleotide endogenous or exogenous to the eukaryotic cell. For example, the cargo polynucleotide can be a polynucleotide residing in the nucleus of the eukaryotic cell. The cargo polynucleotide can be a sequence coding a gene product (e.g., a protein) or a non-coding sequence (e.g., a regulatory polynucleotide).

[0195] In some embodiments, the cargo polynucleotide is a DNA or RNA (e.g., a mRNA) vaccine.

### Aptamers

[0196] In certain example embodiments, the polynucleotide may be an aptamer. In certain embodiments, the one or more agents is an aptamer. Nucleic acid aptamers are nucleic acid species that have been engineered through repeated rounds of in vitro selection or equivalently, SELEX (systematic evolution of ligands by exponential enrichment) to bind to various molecular targets such as small molecules, proteins, nucleic acids, cells, tissues, and organisms. Nucleic acid aptamers have specific binding affinity to molecules through interactions other than classic Watson-Crick base pairing. Aptamers are useful in biotechnological and therapeutic applications as they offer molecular recognition properties similar to antibodies. In addition to their discriminate recognition, aptamers offer advantages over antibodies as they can be engineered completely in a test tube, are readily produced by chemical synthesis, possess desirable storage properties, and elicit little or no immunogenicity in therapeutic applications. In certain embodiments, RNA aptamers may be expressed from a DNA construct. In other embodiments, a nucleic acid aptamer may be linked to another polynucleotide sequence. The polynucleotide sequence may be a double stranded DNA polynucleotide sequence. The aptamer may be covalently linked to one strand of the polynucleotide sequence. The aptamer may be ligated to the polynucleotide sequence. The polynucleotide sequence may be configured, such that the polynucleotide sequence may be linked to a solid support or ligated to another polynucleotide sequence.

[0197] Aptamers, like peptides generated by phage display or monoclonal antibodies (“mAbs”), are capable of specifically binding to selected targets and modulating the target's activity, e.g., through binding, aptamers may block their target's ability to function. A typical aptamer is 10-15 kDa in size (30-45 nucleotides), binds its target with sub-nanomolar affinity, and discriminates against closely related targets (e.g., aptamers will typically not bind other proteins from the same gene family). Structural studies have shown that aptamers are capable of using the same types of binding interactions (e.g., hydrogen bonding, electrostatic complementarity, hydrophobic contacts, steric exclusion) that drives affinity and specificity in antibody-antigen complexes.

[0198] Aptamers have a number of desirable characteristics for use in research and as therapeutics and diagnostics including high specificity and affinity, biological efficacy, and excellent pharmacokinetic properties. In addition, they offer specific competitive advantages over antibodies and other protein biologics. Aptamers are chemically synthesized and are readily scaled as needed to meet production demand for research, diagnostic or therapeutic applications. Aptamers are chemically robust. They are intrinsically adapted to regain activity following exposure to factors such as heat and denaturants and can be stored for extended periods (>1 yr) at room temperature as lyophilized powders. Not being bound by a theory, aptamers bound to a solid support or beads may be stored for extended periods.

[0199] Oligonucleotides in their phosphodiester form may be quickly degraded by intracellular and extracellular enzymes such as endonucleases and exonucleases. Aptamers can include modified nucleotides conferring improved characteristics on the ligand, such as improved in vivo stability or improved delivery characteristics. Examples of such modifications include chemical substitutions at the ribose and/or phosphate and/or base positions. SELEX identified nucleic acid ligands containing modified nucleotides are described, e.g., in U.S. Pat. No. 5,660,985, which describes oligonucleotides containing nucleotide derivatives chemically modified at the 2′ position of ribose, 5 position of pyrimidines, and 8 position of purines, U.S. Pat. No. 5,756,703 which describes oligonucleotides containing various 2′-modified pyrimidines, and U.S. Pat. No. 5,580,737 which describes highly specific nucleic acid ligands containing one or more nucleotides modified with 2′-amino (2′-NH2), 2′-fluoro (2′-F), and/or 2′-O-methyl (2′-OMe) substituents. Modifications of aptamers may also include modifications at exocyclic amines, substitution of 4-thiouridine, substitution of 5-bromo or 5-iodo-uracil; backbone modifications, phosphorothioate or allyl phosphate modifications, methylations, and unusual base-pairing combinations such as the isobases isocytidine and isoguanosine. Modifications can also include 3′ and 5′ modifications such as capping. As used herein, the term phosphorothioate encompasses one or more non-bridging oxygen atoms in a phosphodiester bond replaced by one or more sulfur atoms. In further embodiments, the oligonucleotides comprise modified sugar groups, for example, one or more of the hydroxyl groups is replaced with halogen, aliphatic groups, or functionalized as ethers or amines. In one embodiment, the 2′-position of the furanose residue is substituted by any of an O-methyl, O-alkyl, 0-allyl, S-alkyl, S-allyl, or halo group. Methods of synthesis of 2′-modified sugars are described, e.g., in Sproat, et al., Nucl. Acid Res. 19:733-738 (1991); Cotten, et al, Nucl. Acid Res. 19:2629-2635 (1991); and Hobbs, et al, Biochemistry 12:5138-5145 (1973). Other modifications are known to one of ordinary skill in the art. In certain embodiments, aptamers include aptamers with improved off-rates as described in International Patent Publication No. WO 2009012418, “Method for generating aptamers with improved off-rates,” incorporated herein by reference in its entirety. In certain embodiments aptamers are chosen from a library of aptamers. Such libraries include, but are not limited to, those described in Rohloffet al., “Nucleic Acid Ligands With Protein-like Side Chains: Modified Aptamers and Their Use as Diagnostic and Therapeutic Agents,” Molecular Therapy Nucleic Acids (2014) 3, e201. Aptamers are also commercially available (see e.g., SomaLogic, Inc., Boulder, Colorado). In certain embodiments, the present invention may utilize any aptamer containing any modification as described herein.

[0200] In certain other example embodiments, the polynucleotide may be a ribozyme or other enzymatically active polynucleotide.

### Biologically Active Agents

[0201] In some embodiments, the cargo is a biologically active agent. Biologically active agents include any molecule that induces, directly or indirectly, an effect in a cell. Biologically active agents may be a protein, a nucleic acid, a small molecule, a carbohydrate, and a lipid. When the cargo is or comprises a nucleic acid, the nucleic acid may be a separate entity from the DNA-based carrier. In these embodiments, the DNA-based carrier is not itself the cargo. In other embodiments, the DNA-based carrier may itself comprise a nucleic acid cargo. Therapeutic agents include, without limitation, chemotherapeutic agents, anti-oncogenic agents, anti-angiogenic agents, tumor suppressor agents, anti-microbial agents, enzyme replacement agents, gene expression modulating agents and expression constructs comprising a nucleic acid encoding a therapeutic protein or nucleic acid, and vaccines. Therapeutic agents may be peptides, proteins (including enzymes, antibodies and peptidic hormones), ligands of cytoskeleton, nucleic acid, small molecules, non-peptidic hormones and the like. To increase affinity for the nucleus, agents may be conjugated to a nuclear localization sequence. Nucleic acids that may be delivered by the method of the invention include synthetic and natural nucleic acid material, including DNA, RNA, transposon DNA, antisense nucleic acids, dsRNA, siRNAs, transcription RNA, messenger RNA, ribosomal RNA, small nucleolar RNA, microRNA, ribozymes, plasmids, expression constructs, etc.

[0202] Imaging agents include contrast agents, such as ferrofluid-based MRI contrast agents and gadolinium agents for PET scans, fluorescein isothiocyanate and 6-TAMARA. Monitoring agents include reporter probes, biosensors, green fluorescent protein, and the like. Reporter probes include photo-emitting compounds, such as phosphors, radioactive moieties, and fluorescent moieties, such as rare earth chelates (e.g., europium chelates), Texas Red, rhodamine, fluorescein, FITC, fluor-3, 5 hexadecanoyl fluorescein, Cy2, fluor X, Cy3, Cy3.5, Cy5, Cy5.5, Cy7, dansyl, phycocrytherin, phycocyanin, spectrum orange, spectrum green, and/or derivatives of any one or more of the above. Biosensors are molecules that detect and transmit information regarding a physiological change or process, for instance, by detecting the presence or change in the presence of a chemical. The information obtained by the biosensor typically activates a signal that is detected with a transducer. The transducer typically converts the biological response into an electrical signal. Examples of biosensors include enzymes, antibodies, DNA, receptors, and regulator proteins used as recognition elements, which can be used either in whole cells or isolated and used independently (D'Souza, 2001, Biosensors and Bioelectronics 16:337-353).

[0203] One or two or more different cargoes may be delivered by the delivery particles described herein.

[0204] In some embodiments, the cargo may be linked to one or more envelope proteins by a linker, as described elsewhere herein. A suitable linker may include, but is not necessarily limited to, a glycine-serine linker. In some embodiments, the glycine-serine linker is (GGS)₃ (SEQ ID NO: 27).

[0205] In some embodiments, the cargo comprises a ribonucleoprotein. In specific embodiments, the cargo comprises a genetic modulating agent.

[0206] As used herein the term “altered expression” may particularly denote altered production of the recited gene products by a cell. As used herein, the term “gene product(s)” includes RNA transcribed from a gene (e.g., mRNA), or a polypeptide encoded by a gene or translated from RNA.

### Genetic Modifying Systems

[0207] In some embodiments, the cargo is a polynucleotide encoding a gene modifying system. Gene modifying systems may include, but are not limited to, zinc finger nucleases, TALE nucleases (TALENs), meganucleases, RNAi, and CRISPR-Cas systems. The generic modifying systems can, upon delivery as cargo to a target cell, such as a CNS cell, result in a genetic modification in that cell. In some embodiments, the genetic modification cures, treats, and/or prevents a disease or disorder, such as a CNS, eye, or inner ear disease or disorder.

### CRISPR-Cas Systems

[0208] The CRISPR-Cas system may include a Class 1 comprising a Type I, Type III or Type IV Cas proteins as described in Makarova et al. “Evolutionary classification of CRISPR-Cas systems: a burst of class 2 and derived variants” Nature Reviews Microbiology, 18:67-81 (February 2020), and incorporated in its entirety herein by reference, and particularly as described in FIG. 1, p. 326. polynucleotide modifying system or component(s) thereof. The CRISPR-Cas system may also be a Class 2 CRISPR-Cas system such as a Type II, Type V, or Type VI system, which are described in Makarova et al. “Evolutionary classification of CRISPR-Cas systems: a burst of class 2 and derived variants” Nature Reviews Microbiology, 18:67-81 (February 2020), incorporated herein by reference.

[0209] CRISPR-Cas systems may also include further modified systems where the Cas protein is rendered catalytically inactive and fused to other functional domains or polypeptides to derive new functions. Example modified systems include base editor, primer editors, and CRISPR-associated transposase (CAST) systems.

[0210] Example base editing systems include DNA base editors (Komor et al. 2016 Nature. 533:420-424; Nishida et a. 2016. Science 353; Gaudelli et al. 2017 Nature 551:464-471; Mok et al., Cell. 182, 463-480 (2020); Koblan et al., Nature 589, 608-614 (2021); Rees and Liu. 2018. 19(12):770-788. doi: 10.1038/s41576-018-0059-1; Song et al., Nat Biomed Eng. 2020 Jan; 4(1):125-130. doi: 10.1038/s41551-019-0357-8; Koblan et al. 2018. 6(9):843-846. doi: 10.1038/nbt.4172; Thuronyi et al., Nat Biotechnol. 2019 September; 37(9):1070-1079. doi: 10.1038/s41587-019-0193-0; Doman et al., Nat Biotechnol. 2020 May; 38(5):620-628. doi: 10.1038/s41587-020-0414-6; Richter et al., Nat Biotechnol. 2020 July; 38(7):883-891. doi: 10.1038/s41587-020-0453-z; Huang et al., Nat Protoc. 2021 February; 16(2):1089-1128. doi: 10.1038/s41596-020-00450-9; Koblan et al., Nat Biotechnol. 2021 Jun. 28. doi: 10.1038/s41587-021-00938-z; WO 2018/213708, WO 2018/213726, WO/2019/126709, WO/2019/1267; WO/2019/126762) and RNA base editors (Cox et al. 2017. Science 358:1019-1027, Rees and Liu. 2018. 19(12):770-788. doi: 10.1038/s41576-018-0059-1; Abudayyeh 00, et al., A cytosine deaminase for programmable single-base RNA editing, Science 26 Jul. 2019; WO 2019/005883, WO 2019/005886, WO 2019/071048, PCT/US2018/0579, PCT US/2018/067207).

[0211] Example prime editing systems include those as described in Anzalone et al. 2019 Nature 576:149-157; Gao et al. 2021 Genome Biol. 22:83; Jang et al. 2021 Nature Biomed. Eng. doi.org/10.1038/s41551-021-00788-9; WO 2021/072328; WO 2020/191248; WO 2020/191249; WO 2020/191239; WO 2020/191245; WO 2020/191246; WO 2020/191241; WO 2020/191171; WO 202/191153; WO 2020/191242; WO 2020/191233; WO 2020/191243; and WO 2020/191234.

[0212] Example CAST systems include those as described in Klompe et al. 2019 Nature 571(7764):219-225; Strecker et al. 2019 Science 365:48-53; and Saito et al. 2021 Cell 184:2441-2453; WO 2020/131862; WO 2019090173; WO 2019090174; WO 2019090175, and WO 2019/241452.

[0213] Example non-LTR retrotransposon systems include those as described in WO2021/102042.

[0214] Example Cas-associated ligase systems include those as described in WO2021/133977.

[0215] For modified CRISPR-Cas system that exceed the cargo capacity for a delivery vehicle incorporating the targeting moieties disclosed herein, a split-intein approach to divide CBE and ABE into reconstitutable halves, is described in Levy et al. Nature Biomedical Engineering doi.org/10.1038/s41441-019-0505-5 (2019), which is incorporated herein by reference.

### Zinc Finger Nucleases

[0216] Zinc Finger proteins can comprise a functional domain. The first synthetic zinc finger nucleases (ZFNs) were developed by fusing a ZF protein to the catalytic domain of the Type IIS restriction enzyme FokI. (Kim, Y. G. et al., 1994, Chimeric restriction endonuclease, Proc. Natl. Acad. Sci. U.S.A. 91, 883-887; Kim, Y. G. et al., 1996, Hybrid restriction enzymes: zinc finger fusions to Fok I cleavage domain. Proc. Natl. Acad. Sci. U.S.A. 93, 1156-1160). Increased cleavage specificity can be attained with decreased off target activity by use of paired ZFN heterodimers, each targeting different nucleotide sequences separated by a short spacer. (Doyon, Y. et al., 2011, Enhancing zinc-finger-nuclease activity with improved obligate heterodimeric architectures. Nat. Methods 8, 74-79). ZFPs can also be designed as transcription activators and repressors and have been used to target many genes in a wide variety of organisms. Exemplary methods of genome editing using ZFNs can be found for example in U.S. Pat. Nos. 6,534,261, 6,607,882, 6,746,838, 6,794,136, 6,824,978, 6,866,997, 6,933,113, 6,979,539, 7,013,219, 7,030,215, 7,220,719, 7,241,573, 7,241,574, 7,585,849, 7,595,376, 6,903,185, and 6,479,626, all of which are specifically incorporated by reference.

### Meganucleases

[0217] In some embodiments, a meganuclease or system thereof can be used to modify a polynucleotide. Meganucleases, which are endodeoxyribonucleases characterized by a large recognition site (double-stranded DNA sequences of 12 to 40 base pairs). Exemplary methods for using meganucleases can be found in U.S. Pat. Nos. 8,163,514, 8,133,697, 8,021,867, 8,119,361, 8,119,381, 8,124,369, and 8,129,134, which are specifically incorporated herein by reference.

### RNA

[0218] In certain embodiments, the genetic modifying agent is RNAi (e.g., shRNA). As used herein, “gene silencing” or “gene silenced” in reference to an activity of an RNAi molecule, for example a siRNA or miRNA refers to a decrease in the mRNA level in a cell for a target gene by at least about 5%, about 10%, about 20%, about 30%, about 40%, about 50%, about 60%, about 70%, about 80%, about 90%, about 95%, about 99%, about 100% of the mRNA level found in the cell without the presence of the miRNA or RNA interference molecule. In one preferred embodiment, the mRNA levels are decreased by at least about 70%, about 80%, about 90%, about 95%, about 99%, about 100%.

[0219] As used herein, the term “RNAi” refers to any type of interfering RNA, including but not limited to, siRNAi, shRNAi, endogenous microRNA and artificial microRNA. For instance, it includes sequences previously identified as siRNA, regardless of the mechanism of down-stream processing of the RNA (i.e., although siRNAs are believed to have a specific method of in vivo processing resulting in the cleavage of mRNA, such sequences can be incorporated into the vectors in the context of the flanking sequences described herein). The term “RNAi” can include both gene silencing RNAi molecules, and also RNAi effector molecules which activate the expression of a gene.

[0220] As used herein, a “siRNA” refers to a nucleic acid that forms a double stranded RNA, which double stranded RNA has the ability to reduce or inhibit expression of a gene or target gene when the siRNA is present or expressed in the same cell as the target gene. The double stranded RNA siRNA can be formed by the complementary strands. In one embodiment, a siRNA refers to a nucleic acid that can form a double stranded siRNA. The sequence of the siRNA can correspond to the full-length target gene, or a subsequence thereof. Typically, the siRNA is at least about 15-50 nucleotides in length (e.g., each complementary sequence of the double stranded siRNA is about 15-50 nucleotides in length, and the double stranded siRNA is about 15-50 base pairs in length, preferably about 19-30 base nucleotides, preferably about 20-25 nucleotides in length, e.g., 20, 21, 22, 23, 24, 25, 26, 27, 28, 29, or 30 nucleotides in length).

[0221] As used herein “shRNA” or “small hairpin RNA” (also called stem loop) is a type of siRNA. In one embodiment, these shRNAs are composed of a short, e.g., about 19 to about 25 nucleotide, antisense strand, followed by a nucleotide loop of about 5 to about 9 nucleotides, and the analogous sense strand. Alternatively, the sense strand can precede the nucleotide loop structure and the antisense strand can follow.

[0222] The terms “microRNA” or “miRNA” are used interchangeably herein are endogenous RNAs, some of which are known to regulate the expression of protein-coding genes at the posttranscriptional level. Endogenous microRNAs are small RNAs naturally present in the genome that are capable of modulating the productive utilization of mRNA. The term artificial microRNA includes any type of RNA sequence, other than endogenous microRNA, which is capable of modulating the productive utilization of mRNA. MicroRNA sequences have been described in publications such as Lim, et al., Genes & Development, 17, p. 991-1008 (2003), Lim et al Science 299, 1540 (2003), Lee and Ambros Science, 294, 862 (2001), Lau et al., Science 294, 858-861 (2001), Lagos-Quintana et al, Current Biology, 12, 735-739 (2002), Lagos Quintana et al, Science 294, 853-857 (2001), and Lagos-Quintana et al, RNA, 9, 175-179 (2003), which are incorporated herein by reference. Multiple microRNAs can also be incorporated into a precursor molecule. Furthermore, miRNA-like stem-loops can be expressed in cells as a vehicle to deliver artificial miRNAs and short interfering RNAs (siRNAs) for the purpose of modulating the expression of endogenous genes through the miRNA and or RNAi pathways.

[0223] As used herein, “double stranded RNA” or “dsRNA” refers to RNA molecules that are comprised of two strands. Double-stranded molecules include those comprised of a single RNA molecule that doubles back on itself to form a two-stranded structure. For example, the stem loop structure of the progenitor molecules from which the single-stranded miRNA is derived, called the pre-miRNA (Bartel et al. 2004. Cell 1 16:281-297), comprises a dsRNA molecule.

### Polypeptides

[0224] In certain example embodiments, the cargo molecule may one or more polypeptides. The polypeptide may be a full-length protein or a functional fragment or functional domain thereof, that is a fragment or domain that maintains the desired functionality of the full-length protein. As used within this section “protein” is meant to refer to full-length proteins and functional fragments and domains thereof. A wide array of polypeptides may be delivered using the engineered delivery vesicles described herein, including but not limited to, secretory proteins, immunomodulatory proteins, anti-fibrotic proteins, proteins that promote tissue regeneration and/or transplant survival functions, hormones, anti-microbial proteins, anti-fibrillating polypeptides, and antibodies. The one or more polypeptides may also comprise combinations of the aforementioned example classes of polypeptides. It will be appreciated that any of the polypeptides described herein can also be delivered via the engineered delivery vesicles and systems described herein via delivery of the corresponding encoding polynucleotide.

### Secretory Proteins

[0225] In certain example embodiments, the one or more polypeptides may comprise one or more secretory proteins. A secretory is a protein that is actively transported out of the cell, for example, the protein, whether it be endocrine or exocrine, is secreted by a cell. Secretory pathways have been shown conserved from yeast to mammals, and both conventional and unconventional protein secretion pathways have been demonstrated in plants. Chung et al., “An Overview of Protein Secretion in Plant Cells,” MIMB, 1662:19-32, Sep. 1, 2017. Accordingly, identification of secretory proteins in which one or more polynucleotides may be inserted can be identified for particular cells and applications. In embodiments, one of skill in the art can identify secretory proteins based on the presence of a signal peptide, which consists of a short hydrophobic N-terminal sequence.

[0226] In embodiments, the protein is secreted by the secretory pathway. In embodiments, the proteins are exocrine secretion proteins or peptides, comprising enzymes in the digestive tract. In embodiments the protein is endocrine secretion protein or peptide, for example, insulin and other hormones released into the blood stream. In other embodiments, the protein is involved in signaling between or within cells via secreted signaling molecules, for example, paracrine, autocrine, endocrine or neuroendocrine. In embodiments, the secretory protein is selected from the group of cytokines, kinases, hormones and growth factors that bind to receptors on the surface of target cells.

[0227] As described, secretory proteins include hormones, enzymes, toxins, and antimicrobial peptides. Examples of secretory proteins include serine proteases (e.g., pepsins, trypsin, chymotrypsin, elastase and plasminogen activators), amylases, lipases, nucleases (e.g. deoxyribonucleases and ribonucleases), peptidases enzyme inhibitors such as serpins (e.g., al-antitrypsin and plasminogen activator inhibitors), cell attachment proteins such as collagen, fibronectin and laminin, hormones and growth factors such as insulin, growth hormone, prolactin platelet-derived growth factor, epidermal growth factor, fibroblast growth factors, interleukins, interferons, apolipoproteins, and carrier proteins such as transferrin and albumins. In some examples, the secretory protein is insulin or a fragment thereof. In one example, the secretory protein is a precursor of insulin or a fragment thereof. In certain examples, the secretory protein is c-peptide. In a preferred embodiment, the one or more polynucleotides is inserted in the middle of the c-peptide. In some aspects, the secretory protein is GLP-1, glucagon, betatrophin, pancreatic amylase, pancreatic lipase, carboxypeptidase, secretin, CCK, a PPAR (e.g. PPAR-alpha, PPAR-gamma, PPAR-delta or a precursor thereof (e.g. preprotein or preproprotein). In aspects, the secretory protein is fibronectin, a clotting factor protein (e.g. Factor VII, VIII, IX, etc.), α2-macroglobulin, al-antitrypsin, antithrombin III, protein S, protein C, plasminogen, α2-antiplasmin, complement components (e.g. complement component C1-9), albumin, ceruloplasmin, transcortin, haptoglobin, hemopexin, IGF binding protein, retinol binding protein, transferrin, vitamin-D binding protein, transthyretin, IGF-1, thrombopoietin, hepcidin, angiotensinogen, or a precursor protein thereof. In aspects, the secretory protein is pepsinogen, gastric lipase, sucrase, gastrin, lactase, maltase, peptidase, or a precursor thereof. In aspects, the secretory protein is renin, erythropoietin, angiotensin, adrenocorticotropic hormone (ACM), amylin, atrial natriuretic peptide (ANP), calcitonin, ghrelin, growth hormone (GH), leptin, melanocyte-stimulating hormone (MSH), oxytocin, prolactin, follicle-stimulating hormone (FSH), thyroid stimulating hormone (TSH), thyrotropin-releasing hormone (TRH), vasopressin, vasoactive intestinal peptide, or a precursor thereof.

### Immunomodulatory Polypeptides

[0228] In certain example embodiments, the one or more polypeptides may comprise one or more immunomodulatory protein. In certain embodiments, the present invention provides for modulating immune states. The immune state can be modulated by modulating T cell function or dysfunction. In particular embodiments, the immune state is modulated by expression and secretion of IL-10 and/or other cytokines as described elsewhere herein. In certain embodiments, T cells can affect the overall immune state, such as other immune cells in proximity.

[0229] The polynucleotides may encode one or more immunomodulatory proteins, including immunosuppressive proteins. The term “immunosuppressive” means that immune response in an organism is reduced or depressed. An immunosuppressive protein may suppress, reduce, or mask the immune system or degree of response of the subject being treated. For example, an immunosuppressive protein may suppress cytokine production, downregulate or suppress self-antigen expression, or mask the MHC antigens. As used herein, the term “immune response” refers to a response by a cell of the immune system, such as a B cell, T cell (CD4+ or CD8+), regulatory T cell, antigen-presenting cell, dendritic cell, monocyte, macrophage, NKT cell, NK cell, basophil, eosinophil, or neutrophil, to a stimulus. In some embodiments, the response is specific for a particular antigen (an “antigen-specific response”) and refers to a response by a CD4 T cell, CD8 T cell, or B cell via their antigen-specific receptor. In some embodiments, an immune response is a T cell response, such as a CD4+ response or a CD8+ response. Such responses by these cells can include, for example, cytotoxicity, proliferation, cytokine or chemokine production, trafficking, or phagocytosis, and can be dependent on the nature of the immune cell undergoing the response. In some cases, the immunosuppressive proteins may exert pleiotropic functions. In some cases, the immunomodulatory proteins may maintain proper regulatory T cells versus effector T cells (Treg/Teff) balance. For examples, the immunomodulatory proteins may expand and/or activate the Tregs and blocks the actions of Teffs, thus providing immunoregulation without global immunosuppression. Target genes associated with immune suppression include, for example, checkpoint inhibitors such PD1, Tim3, Lag3, TIGIT, CTLA-4, and combinations thereof.

[0230] The term “immune cell” as used throughout this specification generally encompasses any cell derived from a hematopoietic stem cell that plays a role in the immune response. The term is intended to encompass immune cells both of the innate or adaptive immune system. The immune cell as referred to herein may be a leukocyte, at any stage of differentiation (e.g., a stem cell, a progenitor cell, a mature cell) or any activation stage. Immune cells include lymphocytes (such as natural killer cells, T-cells (including, e.g., thymocytes, Th or Tc; Th1, Th2, Th17, Thαβ, CD4+, CD8+, effector Th, memory Th, regulatory Th, CD4+/CD8+ thymocytes, CD4−/CD8− thymocytes, γδ T cells, etc.) or B-cells (including, e.g., pro-B cells, early pro-B cells, late pro-B cells, pre-B cells, large pre-B cells, small pre-B cells, immature or mature B-cells, producing antibodies of any isotype, T1 B-cells, T2, B-cells, naïve B-cells, GC B-cells, plasmablasts, memory B-cells, plasma cells, follicular B-cells, marginal zone B-cells, B-1 cells, B-2 cells, regulatory B cells, etc.), such as for instance, monocytes (including, e.g., classical, non-classical, or intermediate monocytes), (segmented or banded) neutrophils, eosinophils, basophils, mast cells, histiocytes, microglia, including various subtypes, maturation, differentiation, or activation stages, such as for instance hematopoietic stem cells, myeloid progenitors, lymphoid progenitors, myeloblasts, promyelocytes, myelocytes, metamyelocytes, monoblasts, promonocytes, lymphoblasts, prolymphocytes, small lymphocytes, macrophages (including, e.g., Kupffer cells, stellate macrophages, M1 or M2 macrophages), (myeloid or lymphoid) dendritic cells (including, e.g., Langerhans cells, conventional or myeloid dendritic cells, plasmacytoid dendritic cells, mDC-1, mDC-2, Mo-DC, HP-DC, veiled cells), granulocytes, polymorphonuclear cells, antigen-presenting cells (APC), etc.

[0231] T cell response refers more specifically to an immune response in which T cells directly or indirectly mediate or otherwise contribute to an immune response in a subject. T cell-mediated response may be associated with cell mediated effects, cytokine mediated effects, and even effects associated with B cells if the B cells are stimulated, for example, by cytokines secreted by T cells. By means of an example but without limitation, effector functions of MHC class I restricted Cytotoxic T lymphocytes (CTLs), may include cytokine and/or cytolytic capabilities, such as lysis of target cells presenting an antigen peptide recognized by the T cell receptor (naturally-occurring TCR or genetically engineered TCR, e.g., chimeric antigen receptor, CAR), secretion of cytokines, preferably IFN gamma, TNF alpha and/or or more immunostimulatory cytokines, such as IL-2, and/or antigen peptide-induced secretion of cytotoxic effector molecules, such as granzymes, perforins or granulysin. By means of example but without limitation, for MHC class II restricted T helper (h) cells, effector functions may be antigen peptide-induced secretion of cytokines, preferably, IFN gamma, TNF alpha, IL-4, IL5, IL-10, and/or IL-2. By means of example but without limitation, for T regulatory (Treg) cells, effector functions may be antigen peptide-induced secretion of cytokines, preferably, IL-10, IL-35, and/or TGF-beta. B cell response refers more specifically to an immune response in which B cells directly or indirectly mediate or otherwise contribute to an immune response in a subject. Effector functions of B cells may include in particular production and secretion of antigen-specific antibodies by B cells (e.g., polyclonal B cell response to a plurality of the epitopes of an antigen (antigen-specific antibody response)), antigen presentation, and/or cytokine secretion.

[0232] During persistent immune activation, such as during uncontrolled tumor growth or chronic infections, subpopulations of immune cells, particularly of CD8+ or CD4+ T cells, become compromised to different extents with respect to their cytokine and/or cytolytic capabilities. Such immune cells, particularly CD8+ or CD4+ T cells, are commonly referred to as “dysfunctional” or as “functionally exhausted” or “exhausted”. As used herein, the term “dysfunctional” or “functional exhaustion” refer to a state of a cell where the cell does not perform its usual function or activity in response to normal input signals, and includes refractivity of immune cells to stimulation, such as stimulation via an activating receptor or a cytokine. Such a function or activity includes, but is not limited to, proliferation (e.g., in response to a cytokine, such as IFN-gamma) or cell division, entrance into the cell cycle, cytokine production, cytotoxicity, migration and trafficking, phagocytotic activity, or any combination thereof. Normal input signals can include, but are not limited to, stimulation via a receptor (e.g., T cell receptor, B cell receptor, co-stimulatory receptor). Unresponsive immune cells can have a reduction of at least 10%, 20%, 300%, 40%, 50%, 60%, 70%, 80%, 90%, 95%, or even 100% in cytotoxic activity, cytokine production, proliferation, trafficking, phagocytotic activity, or any combination thereof, relative to a corresponding control immune cell of the same type. In some particular embodiments of the aspects described herein, a cell that is dysfunctional is a CD8+ T cell that expresses the CD8+ cell surface marker. Such CD8+ cells normally proliferate and produce cell killing enzymes, e.g., they can release the cytotoxins perforin, granzymes, and granulysin. However, exhausted/dysfunctional T cells do not respond adequately to TCR stimulation, and display poor effector function, sustained expression of inhibitory receptors and a transcriptional state distinct from that of functional effector or memory T cells. Dysfunction/exhaustion of T cells thus prevents optimal control of infection and tumors. Exhausted/dysfunctional immune cells, such as T cells, such as CD8+ T cells, may produce reduced amounts of IFN-gamma, TNF-alpha and/or one or more immunostimulatory cytokines, such as IL-2, compared to functional immune cells. Exhausted/dysfunctional immune cells, such as T cells, such as CD8+ T cells, may further produce (increased amounts of) one or more immunosuppressive transcription factors or cytokines, such as IL-10 and/or Foxp3, compared to functional immune cells, thereby contributing to local immunosuppression. Dysfunctional CD8+ T cells can be both protective and detrimental against disease control. As used herein, a “dysfunctional immune state” refers to an overall suppressive immune state in a subject or microenvironment of the subject (e.g., tumor microenvironment). For example, increased IL-10 production leads to suppression of other immune cells in a population of immune cells.

[0233] CD8+ T cell function is associated with their cytokine profiles. It has been reported that effector CD8+ T cells with the ability to simultaneously produce multiple cytokines (polyfunctional CD8+ T cells) are associated with protective immunity in patients with controlled chronic viral infections as well as cancer patients responsive to immune therapy (Spranger et al., 2014, J. Immunother. Cancer, vol. 2, 3). In the presence of persistent antigen CD8+ T cells were found to have lost cytolytic activity completely over time (Moskophidis et al., 1993, Nature, vol. 362, 758-761). It was subsequently found that dysfunctional T cells can differentially produce IL-2, TNFa and IFNg in a hierarchical order (Wherry et al., 2003, J. Virol., vol. 77, 4911-4927). Decoupled dysfunctional and activated CD8+ cell states have also been described (see, e.g., Singer, et al. (2016). A Distinct Gene Module for Dysfunction Uncoupled from Activation in Tumor-Infiltrating T Cells. Cell 166, 1500-1511 e1509; WO/2017/075478; and WO/2018/049025).

[0234] The invention provides compositions and methods for modulating T cell balance. The invention provides T cell modulating agents that modulate T cell balance. For example, in some embodiments, the invention provides T cell modulating agents and methods of using these T cell modulating agents to regulate, influence or otherwise impact the level of and/or balance between T cell types, e.g., between Th17 and other T cell types, for example, Th1-like cells. For example, in some embodiments, the invention provides T cell modulating agents and methods of using these T cell modulating agents to regulate, influence or otherwise impact the level of and/or balance between Th17 activity and inflammatory potential. As used herein, terms such as “h17 cell” and/or “Th17 phenotype” and all grammatical variations thereof refer to a differentiated T helper cell that expresses one or more cytokines selected from the group the consisting of interleukin 17A (IL-17A), interleukin 17F (IL-17F), and interleukin 17A/F heterodimer (IL17-AF). As used herein, terms such as “Th1 cell” and/or “Th1 phenotype” and all grammatical variations thereof refer to a differentiated T helper cell that expresses interferon gamma (IFNγ). As used herein, terms such as “M2 cell” and/or “Th2 phenotype” and all grammatical variations thereof refer to a differentiated T helper cell that expresses one or more cytokines selected from the group the consisting of interleukin 4 (IL-4), interleukin 5 (IL-5) and interleukin 13 (IL-13). As used herein, terms such as “Treg cell” and/or “Treg phenotype” and all grammatical variations thereof refer to a differentiated T cell that expresses Foxp3.

[0235] In some examples, immunomodulatory proteins may be immunosuppressive cytokines. In general, cytokines are small proteins and include interleukins, lymphokines and cell signal molecules, such as tumor necrosis factor and the interferons, which regulate inflammation, hematopoiesis, and response to infections. Examples of immunosuppressive cytokines include interleukin 10 (IL-10), TGF-β, IL-Ra, IL-18Ra, IL-2, IL-3, IL-4, IL-5, IL-6, IL-7, IL-8, IL-9, IL-11, IL-12, IL-13, IL-14, IL-15, IL-16, IL-17, IL-19, IL-20, IL-21, IL-22, IL-23, IL-24, IL-25, IL-26, IL-27, IL-28, IL-29, IL-30, IL-31, IL-32, IL-33, IL-34, IL-35, IL-36, IL-37, PGE2, SCF, G-CSF, CSF-1R, M-CSF, GM-CSF, IFN-α, IFN-β, IFN-γ, IFN-λ, bFGF, CCL2, CXCL1, CXCL8, CXCL12, CX3CL1, CXCR4, TNF-α and VEGF. Examples of immunosuppressive proteins may further include FOXP3, AHR, TRP53, IKZF3, IRF4, IRF1, and SMAD3. In one example, the immunosuppressive protein is IL-10. In one example, the immunosuppressive protein is IL-6. In one example, the immunosuppressive protein is IL-2.

### Anti-Fibrotic Proteins

[0236] In certain example embodiments, the one or more polypeptides may comprise an anti-fibrotic protein. Examples of anti-fibrotic proteins include any protein that reduces or inhibits the production of extracellular matrix components, fibronectin, proteoglycan, collagen, elastin, TGIFs, and SMAD7. In embodiments, the anti-fibrotic protein is a peroxisome proliferator-activated receptor (PPAR), or may include one or more PPARs. In some embodiments, the protein is PPARα, PPAR γ is a dual PPARα/γ. Derosa et al., “The role of various peroxisome proliferator-activated receptors and their ligands in clinical practice” Jan. 18, 2017 J. Cell. Phys. 223:1 153-161.

Proteins that Promote Tissue Regeneration and/or Transplant Survival Functions

[0237] In certain example embodiments, the one or more polypeptides may comprise proteins that promote tissue regeneration and/or transplant survival functions. In some cases, such proteins may induce and/or up-regulate the expression of genes for pancreatic β cell regeneration. In some cases, the proteins that promote transplant survival and functions include the products of genes for pancreatic β cell regeneration. Such genes may include proislet peptides that are proteins or peptides derived from such proteins that stimulate islet cell neogenesis. Examples of genes for pancreatic β cell regeneration include Reg1, Reg2, Reg3, Reg4, human proislet peptide, parathyroid hormone-related peptide (1-36), glucagon-like peptide-1 (GLP-1), extendin-4, prolactin, Hgf, Igf-1, Gip-1, adipsin, resistin, leptin, IL-6, IL-10, Pdx1, Ptfa1, Mafa, Pax6, Pax4, Nkx6.1, Nkx2.2, PDGF, vglycin, placental lactogens (somatomammotropins, e.g., CSH1, CHS2), isoforms thereof, homologs thereof, and orthologs thereof. In certain embodiments, the protein promoting pancreatic B cell regeneration is a cytokine, myokine, and/or adipokine.

### Hormones

[0238] In certain embodiments, the one or more polynucleotides may comprise one or more hormones. The term “hormone” refers to polypeptide hormones, which are generally secreted by glandular organs with ducts. Hormones include proteins from natural sources or from recombinant cell culture and biologically active equivalents of the native sequence hormone, including synthetically produced small-molecule entities and pharmaceutically acceptable derivatives and salts thereof. Included among the hormones are, for example, growth hormone such as human growth hormone, N-methionyl human growth hormone, and bovine growth hormone; parathyroid hormone; thyroxine; insulin; proinsulin; relaxin; prorelaxin; glycoprotein hormones such as follicle stimulating hormone (FSH), thyroid stimulating hormone (TSH), and luteinizing hormone (LH); prolactin, placental lactogen, mouse gonadotropin-associated peptide, inhibin; activin; mullerian-inhibiting substance; and thrombopoietin, growth hormone (GH), adrenocorticotropic hormone (ACTH), dehydroepiandrosterone (DHEA), cortisol, epinephrine, thyroid hormone, estrogen, progesterone, placental lactogens (somatomammotropins, e.g. CSH1, CHS2), testosterone. and neuroendocrine hormones. In certain examples, the hormone is secreted from pancreas, e.g., insulin, glucagon, somatostatin, pancreatic polypeptide and ghrelin. In some examples, the hormone is insulin.

[0239] Hormones herein may also include growth factors, e.g., fibroblast growth factor (FGF) family, bone morphogenic protein (BMP) family, platelet derived growth factor (PDGF) family, transforming growth factor beta (TGFbeta) family, nerve growth factor (NGF) family, epidermal growth factor (EGF) family, insulin related growth factor (IGF) family, hepatocyte growth factor (HGF) family, hematopoietic growth factors (HeGFs), platelet-derived endothelial cell growth factor (PD-ECGF), angiopoietin, vascular endothelial growth factor (VEGF) family, and glucocorticoids. In a particular embodiment, the hormone is insulin or incretins such as exenatide, GLP-1.

### Neurohormones

[0240] In embodiments, the secreted peptide is a neurohormone, a hormone produced and released by neuroendocrine cells. Example neurohormones include Thyrotropin-releasing hormone, Corticotropin-releasing hormone, Histamine, Growth hormone-releasing hormone, Somatostatin, Gonadotropin-releasing hormone, Serotonin, Dopamine, Neurotensin, Oxytocin, Vasopressin, Epinephrine, and Norepinephrine.

### Anti-Microbial Proteins

[0241] In some embodiments, the one or more polypeptides may comprise one or more anti-microbial proteins. In embodiments where the cell is mammalian cell, human host defense antimicrobial peptides and proteins (AMPs) play a critical role in warding off invading microbial pathogens. In certain embodiments, the anti-microbial is a-defensin HD-6, HNP-1 and β-defensin hBD-3, lysozyme, cathelcidin LL-37, C-type lectin RegIIIalpha, for example. See, e.g., Wang, “Human Antimicrobial Peptide and Proteins” Pharma, May 2014, 7(5): 545-594, incorporated herein by reference.

### Anti-Fibrillating Proteins

[0242] In certain example embodiments, the one or more polypeptides may comprise one or more anti-fibrillating polypeptides. The anti-fibrillating polypeptide can be the secreted polypeptide. In some embodiments, the anti-fibrillating polypeptide is co-expressed with one or more other polynucleotides and/or polypeptides described elsewhere herein. The anti-fibrillating agent can be secreted and act to inhibit the fibrillation and/or aggregation of endogenous proteins and/or exogenous proteins that it may be co-expressed therewith. In some embodiments, the anti-fibrillating agent is P4 (VITYF (SEQ ID NO: 55)), P5 (VVVVV (SEQ ID NO: 56)), KR7 (KPWWPRR (SEQ ID NO: 57)), NK9 (NIVNVSLVK (SEQ ID NO: 58)), iAb5p (Leu-Pro-Phe-Phe-Asp (SEQ ID NO: 59)), KLVF (SEQ ID NO: 60) and derivatives thereof, indolicidin, carnosine, a hexapeptide as set forth in Wang et al. 2014. ACS Chem Neurosci. 5:972-981, alpha sheet peptides having alternating D-amino acids and L-amino acids as set forth in Hopping et al. 2014. Elife 3:e01681, D-(PGKLVYA (SEQ ID NO: 61)), RI-OR2-TAT, cyclo(17, 21)-(Lys17, Asp21)A_(1-28), SEN304, SEN1576, D3, R8-Aβ(25-35), human yD-crystallin (HGD), poly-lysine, heparin, poly-Asp, polyGl, poly-L-lysine, poly-L-glutamic acid, LVEALYL (SEQ ID NO: 62), RGFFYT (SEQ ID NO: 63), a peptide set forth or as designed/generated by the method set forth in U.S. Pat. No. 8,754,034, and combinations thereof. In aspects, the anti-fibrillating agent is a D-peptide. In aspects, the anti-fibrillating agent is an L-peptide. In aspects, the anti-fibrillating agent is a retro-inverso modified peptide. Retro-inverso modified peptides are derived from peptides by substituting the L-amino acids for their D-counterparts and reversing the sequence to mimic the original peptide since they retain the same spatial positioning of the side chains and 3D structure. In aspects, the retro-inverso modified peptide is derived from a natural or synthetic Aβ peptide. In some embodiments, the polynucleotide encodes a fibrillation resistant protein. In some embodiments, the fibrillation resistant protein is a modified insulin, see e.g., U.S. Pat. No. 8,343,914.

### Antibodies

[0243] In certain embodiments, the one or more polypeptides may comprise one or more antibodies. The term “antibody” is used interchangeably with the term “immunoglobulin” herein, and includes intact antibodies, fragments of antibodies, e.g., Fab, F(ab′)2 fragments, and intact antibodies and fragments that have been mutated either in their constant and/or variable region (e.g., mutations to produce chimeric, partially humanized, or fully humanized antibodies, as well as to produce antibodies with a desired trait, e.g., enhanced binding and/or reduced FcR binding). The term “fragment” refers to a part or portion of an antibody or antibody chain comprising fewer amino acid residues than an intact or complete antibody or antibody chain. Fragments can be obtained via chemical or enzymatic treatment of an intact or complete antibody or antibody chain. Fragments can also be obtained by recombinant means. Exemplary fragments include Fab, Fab′, F(ab′)2, Fabc, Fd, dAb, VHH and scFv and/or Fv fragments.

### Protease Cleavage Sites

[0244] The one or more cargo polypeptides, as exemplified above, may comprise one or more protease cleavage sites, i.e., amino acid sequences that can be recognized and cleaved by a protease. The protease cleavage sites may be used for generating desired gene products (e.g., intact gene products without any tags or portion of other proteins). The protease cleavage site may be one end or both ends of the protein. Examples of protease cleavage sites that can be used herein include an enterokinase cleavage site, a thrombin cleavage site, a Factor Xa cleavage site, a human rhinovirus 3C protease cleavage site, a tobacco etch virus (TEV) protease cleavage site, a dipeptidyl aminopeptidase cleavage site and a small ubiquitin-like modifier (SUMO)/ubiquitin-like protein-1 (ULP-1) protease cleavage site. In certain examples, the protease cleavage site comprises Lys-Arg.

### Small Molecules

[0245] In some embodiments, the cargo molecule is a small molecule. Techniques and methods of coupling peptides to small molecule agents are generally known in the art and can be applied here to couple a targeting moiety effective to target a CNS cell to a small molecule cargo. Small molecules include, without limitation, hormones, immunomodulators, antipyretics, anxiolytics, antipsychotics, analgesics, antispasmodics, anti-inflammatories, anti-histamines, anti-infectives, radiation sensitizers, chemotherapeutics.

[0246] Suitable hormones include, but are not limited to, amino-acid derived hormones (e.g., melatonin and thyroxine), small peptide hormones and protein hormones (e.g., thyrotropin-releasing hormone, vasopressin, insulin, growth hormone, luteinizing hormone, follicle-stimulating hormone, and thyroid-stimulating hormone), eicosanoids (e.g., arachidonic acid, lipoxins, and prostaglandins), and steroid hormones (e.g., estradiol, testosterone, tetrahydro testosteron Cortisol). Suitable immunomodulators include, but are not limited to, prednisone, azathioprine, 6-MP, cyclosporine, tacrolimus, methotrexate, interleukins (e.g., IL-2, IL-7, and IL-12), cytokines (e.g., interferons (e.g., IFN-α, IFN-β, IFN-ε, IFN-K, IFN-ω, and IFN-γ), granulocyte colony-stimulating factor, and imiquimod), chemokines (e.g., CCL3, CCL26 and CXCL7), cytosine phosphate-guanosine, oligodeoxynucleotides, glucans, antibodies, and aptamers).

[0247] Suitable antipyretics include, but are not limited to, non-steroidal anti-inflammants (e.g., ibuprofen, naproxen, ketoprofen, and nimesulide), aspirin and related salicylates (e.g., choline salicylate, magnesium salicylae, and sodium salicaylate), paracetamol/acetaminophen, metamizole, nabumetone, phenazone, and quinine.

[0248] Suitable anxiolytics include, but are not limited to, benzodiazepines (e.g., alprazolam, bromazepam, chlordiazepoxide, clonazepam, clorazepate, diazepam, flurazepam, lorazepam, oxazepam, temazepam, triazolam, and tofisopam), serotenergic antidepressants (e.g. selective serotonin reuptake inhibitors, tricyclic antidepresents, and monoamine oxidase inhibitors), mebicar, afobazole, selank, bromantane, emoxypine, azapirones, barbiturates, hydroxyzine, pregabalin, validol, and beta blockers.

[0249] Suitable antipsychotics include, but are not limited to, benperidol, bromoperidol, droperidol, haloperidol, moperone, pipaperone, timiperone, fluspirilene, penfluridol, pimozide, acepromazine, chlorpromazine, cyamemazine, dizyrazine, fluphenazine, levomepromazine, mesoridazine, perazine, pericyazine, perphenazine, pipotiazine, prochlorperazine, promazine, promethazine, prothipendyl, thioproperazine, thioridazine, trifluoperazine, triflupromazine, chlorprothixene, clopenthixol, flupentixol, tiotixene, zuclopenthixol, clotiapine, loxapine, prothipendyl, carpipramine, clocapramine, molindone, mosapramine, sulpiride, veralipride, amisulpride, amoxapine, aripiprazole, asenapine, clozapine, blonanserin, iloperidone, lurasidone, melperone, nemonapride, olanzapine, paliperidone, perospirone, quetiapine, remoxipride, risperidone, sertindole, trimipramine, ziprasidone, zotepine, alstonie, befeprunox, bitopertin, brexpiprazole, cannabidiol, cariprazine, pimavanserin, pomaglumetad methionil, vabicaserin, xanomeline, and zicronapine.

[0250] Suitable analgesics include, but are not limited to, paracetamol/acetaminophen, nonsteroidal anti-inflammants (e.g. ibuprofen, naproxen, ketoprofen, and nimesulide), COX-2 inhibitors (e.g. rofecoxib, celecoxib, and etoricoxib), opioids (e.g. morphine, codeine, oxycodone, hydrocodone, dihydromorphine, pethidine, buprenorphine), tramadol, norepinephrine, flupiretine, nefopam, orphenadrine, pregabalin, gabapentin, cyclobenzaprine, scopolamine, methadone, ketobemidone, piritramide, and aspirin and related salicylates (e.g., choline salicylate, magnesium salicylate, and sodium salicylate).

[0251] Suitable antispasmodics include, but are not limited to, mebeverine, papverine, cyclobenzaprine, carisoprodol, orphenadrine, tizanidine, metaxalone, methodcarbamol, chlorzoxazone, baclofen, dantrolene, baclofen, tizanidine, and dantrolene. Suitable anti-inflammatories include, but are not limited to, prednisone, non-steroidal anti-inflammants (e.g., ibuprofen, naproxen, ketoprofen, and nimesulide), COX-2 inhibitors (e.g., rofecoxib, celecoxib, and etoricoxib), and immune selective anti-inflammatory derivatives (e.g., submandibular gland peptide-T and its derivatives).

[0252] Suitable anti-histamines include, but are not limited to, H1-receptor antagonists (e.g., acrivastine, azelastine, bilastine, brompheniramine, buclizine, bromodiphenhydramine, carbinoxamine, cetirizine, chlorpromazine, cyclizine, chlorpheniramine, clemastine, cyproheptadine, desloratadine, dexbromapheniramine, dexchlorpheniramine, dimenhydrinate, dimetindene, diphenhydramine, doxylamine, ebasine, embramine, fexofenadine, hydroxyzine, levocetirzine, loratadine, meclozine, mirtazapine, olopatadine, orphenadrine, phenindamine, pheniramine, phenyltoloxamine, promethazine, pyrilamine, quetiapine, rupatadine, tripelennamine, and triprolidine), H2-receptor antagonists (e.g., cimetidine, famotidine, lafutidine, nizatidine, rafitidine, and roxatidine), tritoqualine, catechin, cromoglicate, nedocromil, and p2-adrenergic agonists.

[0253] Suitable anti-infectives include, but are not limited to, amebicides (e.g., nitazoxanide, paromomycin, metronidazole, tinidazole, chloroquine, miltefosine, amphotericin b, and iodoquinol), aminoglycosides (e.g., paromomycin, tobramycin, gentamicin, amikacin, kanamycin, and neomycin), anthelmintics (e.g., pyrantel, mebendazole, ivermectin, praziquantel, abendazole, thiabendazole, oxamniquine), antifungals (e.g., azole antifungals (e.g., itraconazole, fluconazole, posaconazole, ketoconazole, clotrimazole, miconazole, and voriconazole), echinocandins (e.g., caspofungin, anidulafungin, and micafungin), griseofulvin, terbinafine, flucytosine, and polyenes (e.g., nystatin, and amphotericin b), antimalarial agents (e.g., pyrimethamine/sulfadoxine, artemether/lumefantrine, atovaquone/proquanil, quinine, hydroxychloroquine, mefloquine, chloroquine, doxycycline, pyrimethamine, and halofantrine), antituberculosis agents (e.g., aminosalicylates (e.g., aminosalicylic acid), isoniazid/rifampin, isoniazid/pyrazinamide/rifampin, bedaquiline, isoniazid, ethambutol, rifampin, rifabutin, rifapentine, capreomycin, and cycloserine), antivirals (e.g., amantadine, rimantadine, abacavir/lamivudine, emtricitabine/tenofovir, cobicistat/elvitegravir/emtricitabine/tenofovir, efavirenz/emtricitabine/tenofovir, avacavir/lamivudine/zidovudine, lamivudine/zidovudine, emtricitabine/tenofovir, emtricitabine/opinavir/ritonavir/tenofovir, interferon alfa-2v/ribavirin, peginterferon alfa-2b, maraviroc, raltegravir, dolutegravir, enfuvirtide, foscamet, fomivirsen, oseltamivir, zanamivir, nevirapine, efavirenz, etravirine, rilpivirine, delaviridine, nevirapine, entecavir, lamivudine, adefovir, sofosbuvir, didanosine, tenofovir, avacivr, zidovudine, stavudine, emtricitabine, xalcitabine, telbivudine, simeprevir, boceprevir, telaprevir, lopinavir/ritonavir, fosamprenvir, dranuavir, ritonavir, tipranavir, atazanavir, nelfinavir, amprenavir, indinavir, sawuinavir, ribavirin, valcyclovir, acyclovir, famciclovir, ganciclovir, and valganciclovir), carbapenems (e.g., doripenem, meropenem, ertapenem, and cilastatin/imipenem), cephalosporins (e.g., cefadroxil, cephradine, cefazolin, cephalexin, cefepime, ceflaroline, loracarbef, cefotetan, cefuroxime, cefprozil, loracarbef, cefoxitin, cefaclor, ceftibuten, ceftriaxone, cefotaxime, cefpodoxime, cefdinir, cefixime, cefditoren, cefizoxime, and ceftazidime), glycopeptide antibiotics (e.g., vancomycin, dalbavancin, oritavancin, and telvancin), glycylcyclines (e.g., tigecycline), leprostatics (e.g., clofazimine and thalidomide), lincomycin and derivatives thereof (e.g., clindamycin and lincomycin), macrolides and derivatives thereof (e.g., telithromycin, fidaxomicin, erthromycin, azithromycin, clarithromycin, dirithromycin, and troleandomycin), linezolid, sulfamethoxazole/trimethoprim, rifaximin, chloramphenicol, fosfomycin, metronidazole, aztreonam, bacitracin, penicillins (amoxicillin, ampicillin, bacampicillin, carbenicillin, piperacillin, ticarcillin, amoxicillin/clavulanate, ampicillin/sulbactam, piperacillin/tazobactam, clavulanate/ticarcillin, penicillin, procaine penicillin, oxaxillin, dicloxacillin, and nafcillin), quinolones (e.g., lomefloxacin, norfloxacin, ofloxacin, qatifloxacin, moxifloxacin, ciprofloxacin, levofloxacin, gemifloxacin, moxifloxacin, cinoxacin, nalidixic acid, enoxacin, grepafloxacin, gatifloxacin, trovafloxacin, and sparfloxacin), sulfonamides (e.g., sulfamethoxazole/trimethoprim, sulfasalazine, and sulfasoxazole), tetracyclines (e.g., doxycycline, demeclocycline, minocycline, doxycycline/salicyclic acid, doxycycline/omega-3 polyunsaturated fatty acids, and tetracycline), and urinary anti-infectives (e.g., nitrofurantoin, methenamine, fosfomycin, cinoxacin, nalidixic acid, trimethoprim, and methylene blue).

[0254] Suitable chemotherapeutics include, but are not limited to, paclitaxel, brentuximab vedotin, doxorubicin, 5-FU (fluorouracil), everolimus, pemetrexed, melphalan, pamidronate, anastrozole, exemestane, nelarabine, ofatumumab, bevacizumab, belinostat, tositumomab, carmustine, bleomycin, bosutinib, busulfan, alemtuzumab, irinotecan, vandetanib, bicalutamide, lomustine, daunorubicin, clofarabine, cabozantinib, dactinomycin, ramucirumab, cytarabine, Cytoxan, cyclophosphamide, decitabine, dexamethasone, docetaxel, hydroxyurea, decarbazine, leuprolide, epirubicin, oxaliplatin, asparaginase, estramustine, cetuximab, vismodegib, asparginase Erwinia chrysanthemi, amifostine, etoposide, flutamide, toremifene, fulvestrant, letrozole, degarelix, pralatrexate, methotrexate, floxuridine, obinutuzumab, gemcitabine, afatinib, imatinib mesylatem, carmustine, eribulin, trastuzumab, altretamine, topotecan, ponatinib, idarubicin, ifosfamide, ibrutinib, axitinib, interferon alfa-2a, gefitinib, romidepsin, ixabepilone, ruxolitinib, cabazitaxel, ado-trastuzumab emtansine, carfilzomib, chlorambucil, sargramostim, cladribine, mitotane, vincristine, procarbazine, megestrol, trametinib, mesna, strontium-89 chloride, mechlorethamine, mitomycin, busulfan, gemtuzumab ozogamicin, vinorelbine, filgrastim, pegfilgrastim, sorafenib, nilutamide, pentostatin, tamoxifen, mitoxantrone, pegaspargase, denileukin diftitox, alitretinoin, carboplatin, pertuzumab, cisplatin, pomalidomide, prednisone, aldesleukin, mercaptopurine, zoledronic acid, lenalidomide, rituximab, octretide, dasatinib, regorafenib, histrelin, sunitinib, siltuximab, omacetaxine, thioguanine (tioguanine), dabrafenib, erlotinib, bexarotene, temozolomide, thiotepa, thalidomide, BCG, temsirolimus, bendamustine hydrochloride, triptorelin, aresnic trioxide, lapatinib, valrubicin, panitumumab, vinblastine, bortezomib, tretinoin, azacitidine, pazopanib, teniposide, leucovorin, crizotinib, capecitabine, enzalutamide, ipilimumab, goserelin, vorinostat, idelalisib, ceritinib, abiraterone, epothilone, tafluposide, azathioprine, doxifluridine, vindesine, and all-trans retinoic acid.

### Engineered Viral Capsids and Encoding Polynucleotides

[0255] Described herein are exemplary embodiments of engineered viral polypeptides, (e.g., capsid polypeptides), such as adeno-associated virus (AAV) viral polypeptides (e.g., capsid polypeptides), that can be engineered to confer cell-specific tropism to an engineered viral particle (AAV particle) that contains the engineered viral polypeptide (s). The engineered viral polypeptide (s) (e.g., capsid(s)) can be included in an engineered virus particle, and can confer cell-specific tropism, such as CNS-specific tropism, reduced immunogenicity, or both to the engineered viral (e.g., an AAV) particle. As is described elsewhere herein, the particles can include a cargo. In this way, the particles can be a cell-specific delivery vehicle for a cargo. The engineered viral capsids described herein can include one or more engineered viral capsid polypeptides described herein. Engineered viral capsid polypeptides can be lentiviral, retroviral, adenoviral, or AAV. Engineered capsids can contain one or more of the viral capsid polypeptides. Engineered virus particles can include one or more of the engineered viral capsid polypeptides and thus contain an engineered viral capsid. The engineered viral capsid polypeptides, capsids, and/or viral particles that contain one or more CNS-specific targeting moieties containing or composed of one or more n-mer inserts described elsewhere herein. In some embodiments, the engineered viral capsid polypeptides, viral capsids, and/or viral particles can have a CNS-specific tropism conferred to it by the one or more n-mer inserts contained therein.

[0256] The CNS-specific n-mer inserts and targeting moieties can be encoded in whole or in part by a polynucleotide. The engineered viral capsid and/or viral capsid polypeptides can be encoded by one or more engineered viral capsid polynucleotides. In some embodiments, the engineered viral capsid polynucleotide is an engineered AAV capsid polynucleotide, engineered lentiviral capsid polynucleotide, engineered retroviral capsid polynucleotide, or engineered adenovirus capsid polynucleotide. In some embodiments, an engineered viral capsid polynucleotide (e.g., an engineered AAV capsid polynucleotide, engineered lentiviral capsid polynucleotide, engineered retroviral capsid polynucleotide, or engineered adenovirus capsid polynucleotide) can include a 3′ polyadenylation signal. The polyadenylation signal can be an SV40 polyadenylation signal.

[0257] The engineered AAV capsids can be variants of wild-type AAV capsids. In some embodiments, the wild-type AAV capsids can be composed of VP1, VP2, VP3 capsid polypeptides or a combination thereof. In other words, the engineered AAV capsids can include one or more variants of a wild-type VP1, wild-type VP2, and/or wild-type VP3 capsid polypeptides. In some embodiments, the serotype of the reference wild-type AAV capsid can be AAV1, AAV2, AAV3, AAV4, AAV5, AAV6, AAV7, AAV8, AAV9, AAV rh.74, AAV rh.10, AAV12, AAV.DJ, AAV.ie, AAV1.9-3, AAV.Anc80, AAV.Anc80L65, AAV2.7m8, or AAV8BP2 or any combination thereof. In some embodiments, the serotype of the wild-type AAV capsid can be AAV-9. The engineered AAV capsids can have a different tropism than that of the reference wild-type AAV capsid.

[0258] The engineered AAV capsid can contain 1-60 engineered capsid polypeptides. In some embodiments, the engineered AAV capsids can contain 1, 2, 3, 4, 5, 6, 7, 8, 9, 10, 11, 12, 13, 14, 15, 16, 17, 18, 19, 20, 21, 22, 23, 24, 25, 26, 27, 28, 29, 30, 31, 32, 33, 34, 35, 36, 37, 38, 39, 40, 41, 42, 43, 44, 45, 46, 47, 48, 49, 50, 51, 52, 53, 54, 55, 56, 57, 58, 59, or 60 engineered capsid polypeptides. In some embodiments, the engineered AAV capsid can contain 0-59 wild-type AAV capsid polypeptides. In some embodiments, the engineered AAV capsid can contain 0, 1, 2, 3, 4, 5, 6, 7, 8, 9, 10, 11, 12, 13, 14, 15, 16, 17, 18, 19, 20, 21, 22, 23, 24, 25, 26, 27, 28, 29, 30, 31, 32, 33, 34, 35, 36, 37, 38, 39, 40, 41, 42, 43, 44, 45, 46, 47, 48, 49, 50, 51, 52, 53, 54, 55, 56, 57, 58, or 59 wild-type AAV capsid polypeptides.

[0259] In some embodiments, the engineered AAV capsid polypeptide can have an n-mer amino acid insert (also referred herein as an “n-mer insert”), where n can be at least 3 amino acids. In some embodiments, n can be 3, 4, 5, 6, 7, 8, 9, 10, 11, 12, 13, 14, or 15 amino acids. In some embodiments, the engineered AAV capsid can have a 6-mer or 7-mer amino acid insert. In some embodiments, the n-mer amino acid inset can be inserted between two amino acids in the wild-type viral polypeptide (VP) (or capsid polypeptide). In some embodiments, the n-mer insert can be inserted between two amino acids in a variable amino acid region in an AAV capsid polypeptide. The core of each wild-type AAV viral polypeptide contains an eight-stranded beta-barrel motif (betaB to betaI) and an alpha-helix (alphaA) that are conserved in autonomous parvovirus capsids (see e.g., DiMattia et al. 2012. J. Virol. 86(12):6947-6958). Structural variable regions (VRs) occur in the surface loops that connect the beta-strands, which cluster to produce local variations in the capsid surface. AAVs have 12 variable regions (also referred to as hypervariable regions) (see e.g., Weitzman and Linden. 2011. “Adeno-Associated Virus Biology.” In Snyder, R. O., Moullier, P. (eds.) Totowa, NJ: Humana Press). In some embodiments, one or more n-mer inserts can be inserted between two amino acids in one or more of the 12 variable regions in the wild-type AVV capsid polypeptides. In some embodiments, the one or more n-mer inserts can be each be inserted between two amino acids in VR-I, VR-II, VR-III, VR-IV, VR-V, VR-VI, VR-VII, VR-III, VR-IX, VR-X, VR-XI, VR-XII, or a combination thereof. In some embodiments, the n-mer can be inserted between two amino acids in the VR-III of a capsid polypeptide. In some embodiments, the engineered capsid can have an n-mer inserted between any two contiguous amino acids between amino acids 262 and 269, between any two contiguous amino acids between amino acids 327 and 332, between any two contiguous amino acids between amino acids 382 and 386, between any two contiguous amino acids between amino acids 452 and 460, between any two contiguous amino acids between amino acids 488 and 505, between any two contiguous amino acids between amino acids 545 and 558, between any two contiguous amino acids between amino acids 581 and 593, between any two contiguous amino acids between amino acids 704 and 714 of an AAV9 viral polypeptide. In some embodiments, the engineered capsid can have an n-mer inserted between amino acids 588 and 589 of an AAV9 viral polypeptide. In some embodiments, the engineered capsid can have an n-mer insert inserted between amino acids 588 and 589 of an AAV9 viral polypeptide. In some embodiments, the engineered capsid can have an n-mer insert inserted between amino acids 598-599 of an AAV9 viral polypeptide SEQ ID NO: 1 is a reference AAV9 capsid sequence for at least referencing the insertion sites discussed above. It will be appreciated that n-mers can be inserted in analogous positions in AAV viral polypeptides of other serotypes. In some embodiments as previously discussed, the n-mer(s) can be inserted between any two contiguous amino acids within the AAV viral polypeptide and in some embodiments the insertion is made in a variable region.

[0260] In certain example embodiments, the targeting moiety comprises a viral polypeptide.

[0261] In certain example embodiments, the viral polypeptide is a capsid polypeptide.

[0262] In certain example embodiments, wherein the n-mer insert(s) is/are incorporated into the viral polypeptide such that the n-mer insert, or at least the P motif, or at least the double valine motifs located between two amino acids of the viral polypeptide such that the n-mer insert, or at least the P motif, or at least the double valine motif is external to a viral capsid.

[0263] In certain example embodiments, the viral polypeptide is an adeno associated virus (AAV) polypeptide.

[0264] In certain example embodiments, the AAV polypeptide is an AAV capsid polypeptide.

[0265] In certain example embodiments, one or more of the n-mer insert(s) are each incorporated into the AAV polypeptide such that n-mer motif, or at least the P motif, or at least the double valine motif is inserted between any two contiguous amino acids independently selected from amino acids 262-269, 327-332, 382-386, 452-460, 488-505, 527-539, 545-558, 581-593, 598-599, 704-714, or any combination thereof in an AAV9 capsid polypeptide or in an analogous position in an AAV1, AAV2, AAV3, AAV4, AAV5, AAV6, AAV7, AAV8, AAV9, AAV rh.74, AAV rh.10, AAV12, AAV.DJ, AAV.ie, AAV1.9-3, AAV.Anc80, AAV.Anc80L65, AAV2.7m8, or AAV8BP2 capsid polypeptide.

[0266] In certain example embodiments, at least one of the n-mer inserts is incorporated into the AAV polypeptide such that n-mer insert(s), or at least the P motif(s), or at least the double valine motif(s) is inserted between amino acids 588 and 589 in an AAV9 capsid polypeptide or in an analogous position in an AAV1, AAV2, AAV3, AAV4, AAV5, AAV6, AAV7, AAV8, AAV9, AAV rh.74, AAV rh.10, AAV12, AAV.DJ, AAV.ie, AAV1.9-3, AAV.Anc80, AAV.Anc80L65, AAV2.7m8, or AAV8BP2 capsid polypeptide.

[0267] In certain example embodiments, at least one of the n-mer insert(s) is incorporated into the AAV polypeptide such that the n-mer insert(s), or at least the P motif, or at least the double valine motif is inserted between amino acids 598-599 in an AAV9 capsid polypeptide or in an analogous position in an AAV1, AAV2, AAV3, AAV4, AAV5, AAV6, AAV7, AAV8, AAV9, AAV rh.74, AAV rh.10, AAV12, AAV.DJ, AAV.ie, AAV1.9-3, AAV.Anc80, AAV.Anc80L65, AAV2.7m8, or AAV8BP2 capsid polypeptide

SEQ ID NO: 1 AAV9 capsid (wild-type) reference
Sequence:
MAADGYLPDWLEDNLSEGIREWWALKPGAPQPKANQQHQDNARGLVLPG
YKYLGPGNGLDKGEPVNAADAAALEHDKAYDQQLKAGDNPYLKYNHADA
EFQERLKEDTSFGGNLGRAVFQAKKRLLEPLGLVEEAAKTAPGKKRPVE
QSPQEPDSSAGIGKSGAQPAKKRLNFGQTGDTESVPDPQPIGEPPAAPS
GVGSLTMASGGGAPVADNNEGADGVGSSSGNWHCDSQWLGDRVITTSTR
TWALPTYNNHLYKQISNSTSGGSSNDNAYFGYSTPWGYFDFNRFHCHFS
PRDWQRLINNNWGFRPKRLNFKLFNIQVKEVTDNNGVKTIANNLTSTVQ
VFTDSDYQLPYVLGSAHEGCLPPFPADVFMIPQYGYLTLNDGSQAVGRS
SFYCLEYFPSQMLRTGNNFQFSYEFENVPFHSSYAHSQSLDRLMNPLID
QYLYYLSKTINGSGQNQQTLKFSVAGPSNMAVQGRNYIPGPSYRQQRVS
TTVTQNNNSEFAWPGASSWALNGRNSLMNPGPAMASHKEGEDRFFPLSG
SLIFGKQGTGRDNVDADKVMITNEEEIKTTNPVATESYGQVATNHQSAQ
AQAQTGWVQNQGILPGMVWQDRDVYLQGPIWAKIPHTDGNFHPSPLMGG
FGMKHPPPQILIKNTPVPADPPTAFNKDKLNSFITQYSTGQVSVEIEWE
LQKENSKRWNPEIQYTSNYYKSNNVEFAVNTEGVYSEPRPIGTRYLTRN
L

[0268] In some embodiments, an AAV capsid and/or AAV vector can contain one or more targeting moieties having one or more n-mer inserts containing one or more P-motifs. n-mer inserts containing or being P-motifs are described in greater detail elsewhere herein. In some embodiments, an AAV capsid and/or AAV vector can contain one or more targeting moieties having one or more n-mer inserts that are each immediately preceded by AQ or DG in the AAV capsid and/or vector in which they are inserted. In other words, the n-mer insert can be inserted into an AAV capsid and/or AAV vector between two contiguous amino acids such that the two residues preceding the n-mer insert are AQ or DG. In some embodiments, the n-mer insert is engineered such that the two C-terminal residues of the n-mer insert and/or preceding a P-motif of an n-mer insert are AQ or DG. In some embodiments, amino acids 587 and 588 of the AAV capsid or vector or analogous amino acids thereto are DG or DG.

[0269] In some embodiments, an AAV capsid (such as a CNS-specific AAV capsid) contains an n-mer insert that is or contains an n-mer motif, a P-motif, and/or a double valine motif such as any one or more as set forth in Tables 1-38, S1, or FIGS. 15A, 15B, 16A, 16B, 16C, 19A-19C. In some embodiments, insertion of the n-mer insert in an AAV capsid can result in cell, tissue, organ, specific engineered AAV capsids. In some embodiments, the engineered viral polypeptide, engineered viral capsid polypeptide, engineered viral capsid, and/or engineered viral particle has specificity for one or more types of CNS cells and/or tissue. In some embodiments, an engineered viral polypeptide, engineered viral capsid polypeptide, engineered viral capsid and/or engineered viral particle having an n-mer insert that is or contains a P-motif (e.g., those described in Tables 8 and S1 or FIGS. 15A, 15B, 16A, 16B, 16C, 19A-19C and elsewhere herein), has specificity for one or more types of CNS cells and/or tissue.

[0270] In some embodiments, the n-mer insert(s) in an AAV capsid is or includes a “P motif” and/or double valine motif. N-mer inserts, P motifs and double valine motifs are described in greater detail elsewhere herein. In some embodiments, an AAV capsid includes an n-mer insert comprising or consisting of a P-motif having the amino acid sequence XₘPX₁X₂GTX₃RXₙ (SEQ ID NO: 8579), wherein X₁, X₂, X₃, Xₘ, and Xₙ, are each independently selected from any amino acid, wherein m is 0, 1, 2, or 3, and wherein n is 0, 1, 2, 3, 4, 5, 6, or 7. In some embodiments, the an AAV capsid includes an n-mer insert comprising or consisting of a P-motif having the amino acid sequence XₘPX₁QGTX₃RXₙ (SEQ ID NO: 8581), where X₁, X₃, Xₙ, are each selected from any amino acid, where m is 0, 1, 2, or 3, and where n is 0, 1, 2, 3, 4, 5, 6, or 7. In some embodiments, an AAV capsid includes an n-mer insert comprising or consisting of a P-motif having the amino acid sequence PX₁QGTX₃RXₙ (SEQ ID NO: 2), where X₁, X₃, Xₙ, are each selected from any amino acid and where n is 0, 1, 2, 3, 4, 5, 6, or 7. In certain example embodiments, X₂ of the P motif is Q, P, E, or H. In certain example embodiments, X₁ of the P motif is a polar amino acid, optionally a polar uncharged amino acid. In certain example embodiments, X₃ of the P motif is a nonpolar amino acid. In certain example embodiments, X₁ of the double valine motif is R, K, V, or W. In certain example embodiments, X₂ of the double valine motif is T, S, V, Y or R.

[0271] In some embodiments, the AAV capsid includes an n-mer insert that is or includes a double valine motif having the amino acid sequence of the amino acid sequence XₘX₁X₂VX₃X₄VX₅Xₙ, wherein X₁, X₂, X₃, Xₘ, and Xₙ, are each independently selected from any amino acid, wherein m is 0, 1, 2, or 3, and wherein n is 0, 1, 2, 3, 4, 5, 6, or 7. Double valine motifs are further described in greater detail elsewhere herein. In certain example embodiments, X₃ of the double valine motif is G, P, or S. In certain example embodiments, X₄ of the double valine motif is S, D, or T. In certain example embodiments, X₅ of the double valine motif is Y, G, S, or L.

[0272] Exemplary, non-limiting n-mer inserts, P motifs, and double valine motifs are shown at least in e.g., Table 1-38, S1 and FIGS. 15A, 15B, 16A, 16B, 16C, 19A-19C. N-mer inserts, P-motifs, and double valine motifs are further described elsewhere herein.

[0273] In some embodiments, one or more n-mer inserts can be as set forth in any one or more of Tables 1, 2, 3, 8, S1 and FIG. 15A, 15B, 16A, 16B, 16C, 19A, 19B, or 19C can be included in a CNS specific engineered capsid.

[0274] As is described above and demonstrated in e.g., Table 1 and the Working Examples, the n-mer insert can be inserted into an AAV vector between two contiguous amino acids where the amino acids in the AAV vector immediately preceding the n-mer insert can be DG or AQ. In connection with Table 1, the first two amino acids shown in the variants are either AQ or DG, which denote amino acid residues (e.g., residues 587 and 588 that were either endogenous to the vector or show amino acid residues that were part of the n-mer insert that replaced residues at position 587 and 588 in the AAV vector to which the n-mer insert was introduced. Each n-mer insert of Table 1 was tested in both configurations (e.g., with AQ and DG as amino acids 587 and 588 of the AAV).

[0275] In some embodiments, the n-mer insert (such as a 7-mer insert) can be inserted into an AAV vector between two contiguous amino acids where the amino acids in the AAV vector immediately preceding the n-mer insert can be DG or AQ. In some embodiments, the DG or AQ are the amino acids immediately preceding the n-mer insert in the capsid polypeptide when the n-mer insert is included in a capsid polypeptide, particularly an AAV capsid polypeptide. Without being bound by theory, inserts including a DG or AQ at the C terminal end or are inserted into a capsid polypeptide, such as an AAV capsid polypeptide, such that the insert(s) are immediately following an AQ or DG of the capsid polypeptide, may be able to transduce more hosts, such as more strains or species. In some embodiments, amino acids 587 and 588 of the AAV or analogous amino acids thereto are DG. In some embodiments, amino acids 587 and 588 of the AAV or analogous amino acids thereto are AQ. In some embodiments, amino acids 587 and 588 of the AAV or analogous amino acids thereto are AQ and are followed by an n-mer insert. In some embodiments, amino acids 587 and 588 of the AAV or analogous amino acids thereto are DG and are followed by an n-mer insert.

[0276] In some embodiments, the n-mer insert is such that when included in a host polypeptide (e.g., viral or AAV polypeptide, such as a capsid polypeptide) one or more residues of the host polypeptide are replaced with one or more of that from the n-mer insert. In some embodiments, when a C terminal AQ or DG are included in the n-mer insert but are not part of a P motif, the AQ or DG can optionally replace 1 or 2 amino acid residues immediately preceding where the P motif or double valine motif is to be inserted. For example, in some embodiments, where the P motif is desired to be inserted between e.g., 588 and 589 in an AAV9 or position analogous thereto in other AAVs, the n-mer insert can contain e.g., [e.g., AQ or DG]-[P motif or double valine motif]-Xn, where Xn is as described elsewhere herein with respect to the P motifs, where AQ or DG replaces residues 587 and 588 of the AAV9 or position analogous thereto in other AAVs leaving the P motif or double valine motif to be effectively inserted between positions 588 and 589 of the AAV9 or position analogous thereto in other AAVs. It will be appreciated that such an approach can be extrapolated to other host polypeptides besides AAVs as well as other positions within AAVs. Further this can be extrapolated to other C-terminal amino acids besides AQ or DG as the case may be (e.g., Xₘ in the context of P motifs or double valine motifs).

[0277] In some embodiments, the n-mer insert confers CNS transduction efficiency to the targeting moiety. At least Tables 1-3, 7-8, S1, FIGS. 15A, 15B, 16A, 16B, 16C, 19A-19C represent exemplary variants having CNS transduction efficiency. As further discussed in the Working Examples herein, engineered AAV variants such as at least in Table 1 were able to transduce cells from multiple strains of mice. This is in contrast to other AAVs, which at least in some cases, can only transduce certain strains of mice.

[0278] In some embodiments, an AAV capsid can contain one or more targeting moieties having one or more n-mer inserts that are each immediately preceded by AQ and wherein the n-mer insert is KTVGTVY (SEQ ID NO: 3), RSVGSVY (SEQ ID NO: 4), RYLGDAS (SEQ ID NO: 5), WVLPSGG (SEQ ID NO: 6), VTVGSIY (SEQ ID NO: 7), VRGSSIL (SEQ ID NO: 8), RHHGDAA (SEQ ID NO: 9), VIQAMKL (SEQ ID NO: 10), LTYGMAQ (SEQ ID NO: 11), LRIGLSQ (SEQ ID NO: 12), GDYSMIV (SEQ ID NO: 13), VNYSVAL (SEQ ID NO: 14), RHIADAS (SEQ ID NO: 15), RYLGDAT (SEQ ID NO: 16), QRVGFAQ (SEQ ID NO: 17), QIAHGYST (SEQ ID NO: 18), WTLESGH (SEQ ID NO: 19); or GENSARW (SEQ ID NO: 20). In some embodiments, an AAV capsid can contain one or more targeting moieties having one or more n-mer inserts that are each immediately preceded by DG and wherein the n-mer insert is REQQKLW (SEQ ID NO: 21), ASNPGRW (SEQ ID NO: 22), WTLESGH (SEQ ID NO: 23), REQKKLW (SEQ ID NO: 24), ERLLVQL (SEQ ID NO: 25); or RMQRTLY (SEQ ID NO: 26). In some embodiments, amino acids 587 and 588 of the AAV or analogous amino acids thereto are DG and are followed by a 7-mer amino acid insert. In some embodiments, amino acids 587 and 588 of the AAV or analogous amino acids thereto are DG and are followed by a 7-mer amino acid insert, where the 7-mer insert is REQQKLY (SEQ ID NO: 64), ASNPGRW (SEQ ID NO: 22), WTLESGH (SEQ ID NO: 23, REQKKLW (SEQ ID NO: 24), ERLLVQL (SEQ ID NO: 25); or RMQRTLY (SEQ ID NO: 26).

[0279] In some embodiments, the AAV capsids can be CNS-specific. In some embodiments, CNS-specificity of the engineered AAV capsid is conferred by a CNS specific n-mer insert incorporated in the engineered AAV capsid. While not intending to be bound by theory, it is believed that the n-mer insert confers a 3D structure to or within a domain or region of the engineered AAV capsid such that the interaction of an engineered AAV containing said engineered AAV capsid has increased or improved interactions (e.g., increased affinity) with a cell surface receptor and/or other molecule on the surface of an endothelial and/or a CNS cell. In some embodiments the cell surface receptor is AAV receptor (AAVR). In some embodiments, the cell surface receptor is a CNS cell specific AAV receptor. In some embodiments, a CNS specific engineered AAV containing the CNS-specific capsid can have an increased transduction rate, efficiency, amount, or a combination thereof in a CNS cell as compared to other cell types and/or other AAVs that do not contain a CNS-specific engineered AAV capsid.

TABLE 1
Exemplary CNS n-mer inserts

| Variant | | |
|---|---|---|
| Initial ″AQ″ or ″DG″ in the | | |
| inserts in Table 1 correspond | | |
| to the two amino acids in the | | |
| targeting moiety that immediately | | |
| precede the ″n-mer insert″ in a | | |
| targeting moiety or composition | | |
| (e.g., AA 587 and 588 of an AAV9 | | |
| that has an n-mer insert placed | CNS Transduction efficiency | |
| between AA 588 and 589). | Score | SEQ ID NO: |
| AQRSVGSVY | 46000 | 65 |
| AQKTVGTVY | 45980 | 66 |
| AQRYLGDAS | 40592 | 67 |
| DGREQQKLW | 39151 | 68 |
| AQWVLPSGG | 37597 | 69 |
| AQVTVGSIY | 32968 | 70 |
| AQVRGSSIL | 32330 | 71 |
| AQRHHGDAA | 32171 | 72 |
| AQVIQAMKL | 32127 | 73 |
| AQLTYGMAQ | 31956 | 74 |
| AQLRIGLSQ | 31710 | 75 |
| AQGDYSMIV | 31497 | 76 |
| AQVNYSVAL | 31271 | 77 |
| AQRYSGDAS | 31198 | 78 |
| AQRYSGDSV | 29860 | 79 |
| AQRHIADAS | 29554 | 80 |
| AQRYLGDAT | 29527 | 81 |
| AQQRVGFAQ | 29454 | 82 |
| AQIAHGYST | 28216 | 83 |
| AQWTLESGH | 27471 | 84 |
| AQGENSARW | 27287 | 85 |
| DGASNPGRW | 24583 | 86 |
| AQLAVGQKW | 24445 | 87 |
| AQVKLGYSQ | 23912 | 88 |
| AQEAGSARW | 23888 | 89 |
| AQLNYSVSL | 21972 | 90 |
| AQWAISDGY | 21970 | 91 |
| AQRGPGLSQ | 21738 | 92 |
| DGWTLESGH | 20534 | 93 |
| AQRYVGESS | 19635 | 94 |
| DGREQKKLW | 17695 | 95 |
| AQFTLTTPK | 15607 | 96 |
| DGERLLVQL | 15513 | 97 |
| AQEDLLRLR | 14920 | 98 |
| AQPIIEHAV | 12837 | 99 |
| DGRMQRTLY | 12453 | 100 |
| DGWAISDGY | 10828 | 101 |
| AQRYISDSA | 10788 | 102 |
| AQWSTSSGF | 10614 | 103 |
| AQWSLGSGH | 10498 | 104 |
| AQWSQSSGY | 10258 | 105 |
| DGVRGSSIL | 9714 | 106 |
| AQIMLGYST | 9404 | 107 |
| DGKLADSVP | 9356 | 108 |
| AQASNPGRW | 9173 | 109 |
| AQHVENWHI | 8680 | 110 |
| AQVAGSSIL | 8645 | 111 |
| DGRQQQKLW | 8393 | 112 |
| DGTVNNDRF | 8028 | 113 |
| DGMSANERT | 8000 | 114 |
| AQATVAGQF | 7885 | 115 |
| DGRDQQKLW | 7761 | 116 |
| AQGKSPGVW | 7685 | 117 |
| DGGASNGGT | 7674 | 118 |
| AQSLVTSST | 6782 | 119 |
| AQLLYGYSS | 6779 | 120 |
| DGVTELTKF | 6655 | 121 |
| AQALVQNGV | 6638 | 122 |
| AQVLESNPR | 6572 | 123 |
| AQPASHEVL | 6460 | 124 |
| AQAGVQNAL | 6452 | 125 |
| DGKEISVSV | 6420 | 126 |
| AQGLNERVA | 6410 | 127 |
| DGQVAQQGA | 6393 | 128 |
| DGGVAGTNT | 6386 | 129 |
| DGASAQGAL | 6382 | 130 |
| AQAGVSSQT | 6357 | 131 |
| AQKNRRHSV | 6312 | 132 |
| AQKVDSAQL | 6311 | 133 |
| AQYTLSQGW | 6310 | 134 |
| DGQSVDRSK | 6293 | 135 |
| AQASASSPR | 6266 | 136 |
| DGRYVGESS | 6252 | 137 |
| DGLGHNAGV | 6239 | 138 |
| AQPNERINV | 6142 | 139 |
| AQVMSGTSH | 6122 | 140 |
| DGVLVSPGP | 6000 | 141 |
| DGVGISSGV | 6000 | 142 |
| DGSGETLRI | 5977 | 143 |
| DGSTEGAAL | 5954 | 144 |
| AQTSLSQDR | 5943 | 145 |
| AQSANPVVT | 5937 | 146 |
| DGVLASNGP | 5898 | 147 |
| AQAHLDNAP | 5893 | 148 |
| DGVVQVTGR | 5875 | 149 |
| DGFAVRLSS | 5855 | 150 |
| DGLVRDTKT | 5811 | 151 |
| DGSGESLSR | 5804 | 152 |
| AQTNEQAQR | 5796 | 153 |
| DGTLANSQR | 5746 | 154 |
| AQLLADKSV | 5680 | 155 |
| DGSQEQRAR | 5679 | 156 |
| AQVNGNTTY | 5655 | 157 |
| AQALAEAGA | 5624 | 158 |
| DGSREGGNV | 5580 | 159 |
| AQMGDSVTI | 5574 | 160 |
| DGLGGSSMG | 5565 | 161 |
| AQGVRDTNI | 5562 | 162 |
| DGSGSTDKL | 5556 | 163 |
| AQASQNSTV | 5493 | 164 |
| AQGGTSSGH | 5462 | 165 |
| AQAADSSVR | 5404 | 166 |
| AQAANSSVR | 5387 | 167 |
| AQWADSKDQ | 5374 | 168 |
| AQPTQGTVR | 5353 | 169 |
| AQGSTDFKT | 5344 | 170 |
| AQVDHGGVV | 5342 | 171 |
| AQGEQQKGW | 5322 | 172 |
| DGIANLAAS | 5311 | 173 |
| DGAGGVRDR | 5299 | 174 |
| DGGSGSGGL | 5252 | 175 |
| DGTLANSER | 5237 | 176 |
| AQKGASVTL | 5236 | 177 |
| AQSNVALTG | 5235 | 178 |
| DGVNYSVAL | 5206 | 179 |
| AQGLNEHGA | 5193 | 180 |
| DGKNPGVYT | 5173 | 181 |
| DGQREAARI | 5173 | 182 |
| AQGLVDSSR | 5168 | 183 |
| DGNGSEGDR | 5157 | 184 |
| DGNVGVVQL | 5144 | 185 |
| AQVTDGVRS | 5109 | 186 |
| AQVIASNEH | 5109 | 187 |
| AQMSVGQSW | 5098 | 188 |
| DGHSLQTSA | 5096 | 189 |
| AQQDGYGTR | 5093 | 190 |
| AQLSNGQGP | 5071 | 191 |
| AQPVTDSKM | 5068 | 192 |
| AQNGTAADR | 5057 | 193 |
| AQIIVDNGS | 5024 | 194 |
| AQEADNHGR | 5023 | 195 |
| AQAADSSGR | 4995 | 196 |
| AQVVDSNNL | 4986 | 197 |
| DGSGANLSY | 4985 | 198 |
| DGKAHDGEV | 4978 | 199 |

TABLE 2
Additional Exemplary CNS n-mer inserts

| | N-mer | SEQ ID | | SEQ ID |
|---|---|---|---|---|
| Rank | insert | NO: | Encoding sequence | NO: |
| 1 | PSQGTLR | 200 | CCTTCTCAGGGGACGCTTCGG | 201 |
| 2 | TDALTTK | 202 | ACTGATGCGCTTACGACTAAG | 203 |
| 3 | PTQGTVR | 204 | CCCACACAAGGCACAGTCCGT | 205 |
| 4 | PTQGTLR | 206 | CCTACTCAGGGGACGCTTCGG | 207 |
| 5 | PTQGTVR | 208 | CCTACTCAGGGGACGGTTCGG | 209 |
| 6 | STIPTMK | 210 | AGTACTATTCCTACTATGAAG | 211 |
| 7 | TDAGDGK | 212 | ACAGACGCGGGGGACGGCAAA | 213 |
| 8 | YQRTESL | 214 | TATCAGAGGACGGAGTCTCTG | 215 |
| 9 | RVDPSGL | 216 | AGAGTCGACCCCAGTGGACTA | 217 |
| 10 | SLVTSST | 218 | TCGCTTGTTACTTCTAGTACG | 219 |
| 11 | LLAGADR | 220 | TTGCTTGCTGGTGCTGATCGT | 221 |
| 12 | STDRESR | 222 | TCCACGGACCGTGAAAGCCGA | 223 |
| 13 | NGYTEGR | 224 | AATGGGTATACGGAGGGGCGT | 225 |
| 14 | PTQGTFR | 226 | CCGACACAAGGAACATTCAGG | 227 |
| 15 | MTGISIV | 228 | ATGACAGGCATCTCTATCGTA | 229 |
| 16 | DGRAELR | 230 | GATGGGCGGGCGGAGTTGCGT | 231 |
| 17 | AADSSAR | 232 | GCCGCTGACTCATCGGCCCGT | 233 |
| 18 | PTQGTIR | 234 | CCTACTCAGGGGACGATTCGG | 235 |
| 19 | LSRGEEK | 236 | CTTTCGAGGGGTGAGGAGAAG | 237 |
| 20 | AIVSIAQ | 238 | GCGATTGTGTCGATTGCTCAG | 239 |
| 21 | LTSGLAA | 240 | TTGACGTCTGGTTTGGCGGCG | 241 |
| 22 | PTQGTFR | 242 | CCTACTCAGGGGACGTTTCGG | 243 |
| 23 | TLAISGR | 244 | ACTTTGGCGATTTCTGGGCGG | 245 |
| 24 | VHSQDVS | 246 | GTCCACAGTCAAGACGTTTCC | 247 |
| 25 | FQVEQVK | 248 | TTTCAGGTTGAGCAGGTTAAG | 249 |
| 26 | NRELALG | 250 | AACCGCGAACTCGCACTCGGG | 251 |
| 27 | SIGDLGK | 252 | AGTATCGGTGACCTAGGTAAA | 253 |
| 28 | TVGHDNK | 254 | ACCGTAGGACACGACAACAAA | 255 |
| 29 | HSKGFDY | 256 | CACAGTAAAGGTTTCGACTAC | 257 |
| 30 | HTQGTLR | 258 | CATACTCAGGGGACGCTTCGG | 259 |
| 31 | PAQGTLR | 260 | CCGGCGCAAGGAACACTACGA | 261 |
| 32 | AGGGDPR | 262 | GCTGGTGGAGGTGACCCCCGA | 263 |
| 33 | LGKADPV | 264 | TTGGGAAAAGCTGACCCAGTA | 265 |
| 34 | ALNEHVA | 266 | GCTCTGAATGAGCATGTGGCG | 267 |
| 35 | GSGGVSV | 268 | GGTTCGGGTGGTGTTAGTGTG | 269 |
| 36 | PSQGTLR | 270 | CCGTCCCAAGGAACACTCAGG | 271 |
| 37 | TGGRDQY | 272 | ACTGGTGGTCGGGATCAGTAT | 273 |
| 38 | YLVTTEN | 274 | TATTTGGTTACTACTGAGAAT | 275 |
| 39 | LSRDVAV | 276 | TTGTCGAGGGATGTGGCGGTT | 277 |
| 40 | RIVDSVP | 278 | AGGATTGTGGATAGTGTTCCG | 279 |
| 41 | KGYDTPM | 280 | AAAGGCTACGACACACCCATG | 281 |
| 42 | TSREEQW | 282 | ACTTCTCGTGAGGAGCAGTGG | 283 |
| 43 | RASADVV | 284 | AGGGCGAGTGCGGATGTTGTG | 285 |
| 44 | NLGAALS | 286 | AACCTTGGGGCTGCCCTATCG | 287 |
| 45 | SVTDIKH | 288 | TCGGTGACGGACATAAAACAC | 289 |
| 46 | FQDTIGV | 290 | TTTCAGGATACGATTGGGGTG | 291 |
| 47 | PNERLAV | 292 | CCTAACGAACGATTGGCAGTC | 293 |
| 48 | HTIAASM | 294 | CACACCATAGCCGCAAGTATG | 295 |
| 49 | NSDLMGR | 296 | AACAGTGACCTAATGGGCCGA | 297 |
| 50 | AGVSASL | 298 | GCGGGTGTTTCTGCGTCGTTG | 299 |

TABLE 3
Exemplary P-motifs

| n-mer | SEQ | | SEQ |
|---|---|---|---|
| insert | ID NO: | Encoding Sequence(s) | ID NO: |
| PSQGTLR | 300 | CCTTCTCAGGGGACGCTTCGG; | 301 |
| | | CCGTCCCAAGGAACACTCAGG | 302 |
| PTQGTVR | 303 | CCCACACAAGGCACAGTCCGT; | 304 |
| | | CCTACTCAGGGGACGGTTCGG | 305 |
| PTQGTLR | 306 | CCTACTCAGGGGACGCTTCGG | 307 |
| PTQGTFR | 308 | CCGACACAAGGAACATTCAGG; | 309 |
| | | CCTACTCAGGGGACGTTTCGG | 310 |
| PTQGTIR | 311 | CCTACTCAGGGGACGATTCGG | 312 |
| PAQGTLR | 313 | CCGGCGCAAGGAACACTACGA | 314 |

[0280] Also described herein are polynucleotides that encode the engineered targeting moieties, viral polypeptides (e.g., capsid polypeptides), and other polypeptides described herein, including but not limited to, the engineered AAV capsids described herein. In some embodiments, the engineered AAV capsid encoding polynucleotide can be included in a polynucleotide that is configured to be an AAV genome donor in an AAV vector system that can be used to generate engineered AAV particles described elsewhere herein.

[0281] In some embodiments, the AAV capsids or other viral capsids or compositions can be CNS-specific. In some embodiments, CNS-specificity of the engineered AAV or other viral capsid or other composition is conferred by one or more CNS specific n-mer inserts incorporated in the engineered AAV or other viral capsid or other composition described herein. While not intending to be bound by theory, it is believed that the n-mer insert confers a 3D structure to or within a domain or region of the engineered AAV capsid or other viral capsid or other composition such that the interaction of the viral particle or other composition containing the engineered AAV capsid or other viral capsid or other composition described herein has increased or improved interactions (e.g., increased affinity) with a cell surface receptor and/or other molecule on the surface of a CNS cell. In some embodiments, the cell surface receptor is AAV receptor (AAVR). In some embodiments, the cell surface receptor is a CNS cell specific AAV receptor. In some embodiments, the cell surface receptor or other molecule is a cell surface receptor or other molecule selectively expressed on the surface of a CNS cell.

[0282] In some embodiments the engineered viral (e.g., AAV) capsid encoding polynucleotide can be operably coupled to a poly adenylation tail. In some embodiments, the poly adenylation tail can be an SV40 poly adenylation tail. In some embodiments, the viral (e.g., AAV) capsid encoding polynucleotide can be operably coupled to a promoter. In some embodiments, the promoter can be a tissue specific promoter. In some embodiments, neurons an/or supporting cells (e.g., astrocytes, glial cells, Schwann cells, etc.), and combinations thereof. In some embodiments, the promoter can be a constitutive promoter. Suitable tissue specific promoters and constitutive promoters are discussed elsewhere herein and are generally known in the art and can be commercially available.

[0283] Suitable neuronal tissue/cell specific promoters include, but are not limited to, GFAP promoter (astrocytes), SYN1 promoter (neurons), and NSE/RU5′ (mature neurons).

[0284] Other suitable CNS specific promoters can include, but are not limited to, neuroactive peptide cholecystokinin (CCK) (see e.g., Chhatawl et al. Gene Therapy volume 14, pages 575-583(2007)), a brain specific DNA MiniPromoter (such as any of those identified for brain or pan-neronal expression as in de Leeuw et al. Mol. Therapy. 1(5): 2014. doi:10.1038/mtm.2013.5), myelin basic promoter (MBP) (see e.g., von Jonquieres, G., Mersmann, N., Klugmann, C. B., Harasta, A. E., Lutz, B., Teahan, O., et al. (2013). Glial promoter selectivity following AAV-delivery to the immature brain. PLoS One 8 (6), e65646. doi: 10.1371/journal.pone.0065646), glial fibrillary acid protein (GFAP) for expression in astrocytes (see e.g., Smith-Arica, J. R., Morelli, A. E., Larregina, A. T., Smith, J., Lowenstein, P. R., Castro, M. G. (2000). Cell-type-specific and regulatable transgenesis in the adult brain: adenovirus-encoded combined transcriptional targeting and inducible transgene expression. Mol. Ther. 2 (6), 579-587. doi: 10.1006/mthe.2000.0215 and Lee, Y., Messing, A., Su, M., Brenner, M. (2008). GFAP promoter elements required for region-specific and astrocyte-specific expression. Glia 56 (5), 481-493. doi: 10.1002/glia.20622), human myelin associated glycoprotein promoter (full-length or truncated) (see e.g., von Jonquieres, G., Frohlich, D., Klugmann, C. B., Wen, X., Harasta, A. E., Ramkumar, R., et al. (2016). Recombinant human myelin-associated glycoprotein promoter drives selective AAV-mediated transgene expression in oligodendrocytes. Front. Mol. Neurosci. 9, 13. doi: 10.3389/fnmol.2016.00013), F4/80 promoter (see e.g., Rosario, A. M., Cruz, P. E., Ceballos-Diaz, C., Strickland, M. R., Siemienski, Z., Pardo, M., et al. (2016). Microglia-specific targeting by novel capsid-modified AAV6 vectors. Mol. Ther. Methods Clin. Dev. 3, 16026. doi: 10.1038/mtm.2016.26), phosphate-activated glutaminase (PAG) or the vesicular glutamate transporter (vGLUT) promoter (for about 90% glutamatergic neuron-specific expression) (see e.g., Rasmussen, M., Kong, L., Zhang, G. R., Liu, M., Wang, X., Szabo, G., et al. (2007). Glutamatergic or GABAergic neuron-specific, long-term expression in neocortical neurons from helper virus-free HSV-1 vectors containing the phosphate-activated glutaminase, vesicular glutamate transporter-1, or glutamic acid decarboxylase promoter. Brain Res. 1144, 19-32. doi: 10.1016/j.brainres.2007.01.125), glutamic acid decarboxylase (GAD) promoter (for about 90% GABAergic neuron-specific expression) (see e.g., Rasmussen, M., Kong, L., Zhang, G. R., Liu, M., Wang, X., Szabo, G., et al. (2007). Glutamatergic or GABAergic neuron-specific, long-term expression in neocortical neurons from helper virus-free HSV-1 vectors containing the phosphate-activated glutaminase, vesicular glutamate transporter-1, or glutamic acid decarboxylase promoter. Brain Res. 1144, 19-32. doi: 10.1016/j.brainres.2007.01.125), MeCP2 promoter (see e.g., Gray et al. Hum Gene Ther. 2011 September; 22(9):1143-53. doi: 10.1089/hum.2010.245), and retinoblastoma gene promoter (see e.g., Jiang et al., J. Biol. Chem. 2001. 276, 593-600).

[0285] Suitable constitutive promoters include, but are not limited to CMV, RSV, SV40, EF1alpha, CAG, and beta-actin.

A AVs with Reduced Non-CNS Cell Specificity

[0286] In some embodiments, the n-mer insert(s) and/or P-motif(s) are inserted into an AAV polypeptide (e.g., an AAV capsid polypeptide) that has reduced specificity (or no detectable, measurable, or clinically relevant interaction) for one or more non-CNS cell types. Exemplary non-CNS cell types include, but are not limited to, liver, kidney, lung, heart, spleen, muscle (skeletal and cardiac), bone, immune, stomach, intestine, eye, skin cells and the like. In some embodiments, the non-CNS cells are liver cells.

[0287] In certain example embodiments, the AAV capsid polypeptide is an engineered AAV capsid polypeptide having reduced or eliminated uptake in a non-CNS cell as compared to a corresponding wild-type AAV capsid polypeptide.

[0288] In certain example embodiments, the non-CNS cell is a liver cell.

[0289] In certain example embodiments, the wild-type capsid polypeptide is an AAV1, AAV2, AAV3, AAV4, AAV5, AAV6, AAV7, AAV8, AAV rh.74, AAV rh.10, AAV12, AAV.DJ, AAV.ie, AAV1.9-3, AAV.Anc80, AAV.Anc80L65, AAV2.7m8, or AAV8BP2 capsid polypeptide.

[0290] In certain example embodiments, the engineered AAV capsid polypeptide comprises one or more mutations that result in reduced or eliminated uptake in a non-CNS cell. In certain example embodiments, the engineered AAV capsid polypeptide comprises one or more mutations that result in reduced or eliminated uptake in a non-CNS cell as compared to a CNS cell. In certain example embodiments, the engineered AAV capsid polypeptide comprises one or more mutations that result in increased update in a CNS cell as compared to a non-CNS cell, where such a mutation is not the inclusion of a targeting moiety of the present invention, but a mutation that is in addition to such a targeting moiety. In some embodiments, the non-CNS cell is a liver cell or a dorsal root ganglion neuron.

[0291] In certain example embodiments, the one or more mutations are in position 267, in position 269, in position 272, in position 504, in position 505, in position 585, in position 590, or any combination thereof in the AAV9 capsid polypeptide (SEQ ID NO: 1) or in one or more positions corresponding thereto in a non-AAV9 capsid polypeptide.

[0292] In certain example embodiments, the non-AAV9 capsid polypeptide is an AAV1, AAV2, AAV3, AAV4, AAV5, AAV6, AAV7, AAV8, AAV rh.74, AAV rh.10, AAV12, AAV.DJ, AAV.ie, AAV1.9-3, AAV.Anc80, AAV.Anc80L65, AAV2.7m8, or AAV8BP2 capsid polypeptide.

[0293] In certain example embodiments, the mutation in position 267 in the AAV9 capsid polypeptide (SEQ ID NO: 1) or position corresponding thereto in a non-AAV9 capsid polypeptide is a G or X mutation to A, wherein X is any amino acid.

[0294] In certain example embodiments, the mutation in position 269 in the AAV9 capsid polypeptide (SEQ ID NO: 1) or position corresponding thereto in a non-AAV9 capsid polypeptide is an S or X to T mutation, wherein X is any amino acid.

[0295] In certain example embodiments, the mutation in position 272 in the AAV9 capsid polypeptide (SEQ ID NO: 1) or position corresponding thereto in a non-AAV9 capsid polypeptide is an N or to A mutation, wherein X is any amino acid. See also, e.g., International Patent Application Publication No. WO2018119330.

[0296] In certain example embodiments, the mutation in position 504 in the AAV9 capsid polypeptide (SEQ ID NO: 1) or position corresponding thereto in a non-AAV9 capsid polypeptide is a G or X to A mutation, wherein X is any amino acid.

[0297] In certain example embodiments, the mutation in position 505 in the AAV9 capsid polypeptide (SEQ ID NO: 1) or position corresponding thereto in a non-AAV9 capsid polypeptide is a P or X to A mutation, wherein X is any amino acid.

[0298] In certain example embodiments, the mutation in position 585 in the AAV9 capsid polypeptide (SEQ ID NO: 1) or position corresponding thereto in a non-AAV9 capsid polypeptide is an R or X to Q mutation, wherein X is any amino acid.

[0299] In certain example embodiments, the mutation in position 590 in the AAV9 capsid polypeptide (SEQ ID NO: 1) or position corresponding thereto in a non-AAV9 capsid polypeptide is a Q or X to A mutation, wherein X is any amino acid.

[0300] In certain example embodiments, the engineered AAV capsid polypeptide is an engineered AAV9 capsid polypeptide comprising a mutation at position 267, position 269 or both of a wild-type AAV9 capsid polypeptide (SEQ ID NO: 1), wherein the mutation at position 267 is a G to A mutation and wherein the mutation at position 269 is an S to T mutation.

[0301] In certain example embodiments, the engineered AAV capsid polypeptide is an engineered AAV9 capsid polypeptide comprising a mutation at position 590 of a wild-type AAV9 capsid polypeptide (SEQ ID NO: 1), wherein the mutation at position 509 is a Q to A mutation.

[0302] In certain example embodiments, the engineered AAV capsid polypeptide is an engineered AAV9 capsid polypeptide comprising a mutation at position 504, position 505, or both of a wild-type AAV9 capsid polypeptide (SEQ ID NO: 1), wherein the mutation at position 504 is a G to A mutation and wherein the mutation at position 505 is a P to A mutation.

[0303] In some embodiments, the AAV capsid polypeptide in which the n-mer insert(s) and/or P motif(s), and/or double valine motifs are inserted are 80-100 (e.g., 80, 81, 82, 83, 84, 85, 86, 87, 88, 89, 90, 91, 92, 93, 94, 95, 96, 97, 98, 99, to/or 100) percent identical to SEQ ID NO: 4 or SEQ ID NO: 5 of International Patent Application Publication WO 2019/217911, which is incorporated by reference as if expressed in its entirety herein. These sequences are also incorporated herein as SEQ ID NOS: 330 and 331 respectively. It will be appreciated that when considering variants of these AAV9 capsid proteins with reduced liver specificity, that residues 267 and/or 269 must contain the relevant mutations or equivalents.

[0304] In some embodiments, the AAV capsid polypeptide in which the in which the n-mer insert(s), such as an n-mer insert containing a P-motif and/or double valine motif, is/are inserted can be 80-100 (e.g., 80, 81, 82, 83, 84, 85, 86, 87, 88, 89, 90, 91, 92, 93, 94, 95, 96, 97, 98, 99, to/or 100) percent identical to any of those described in Adachi et al., (Nat. Comm. 2014. 5:3075, DOI: 10.1038/ncomms4075) that have reduced specificity for a non-CNS cell, particularly a liver cell. Adachi et al., (Nat. Comm. 2014. 5:3075, DOI: 10.1038/ncomms4075) is incorporated by reference herein as if expressed in its entirety.

[0305] In some embodiments, the modified AAV can have about a 1, 2, 3, 4, 5, 6, 7, 8, 9, 10, 11, 12, 13, 14, 15, 16, 17, 18, 19, 20, 21, 22, 23, 24, 25, 26, 27, 28, 29, 30, 31, 32, 33, 34, 35, 36, 37, 38, 39, 40, 41, 42, 43, 44, 45, 46, 47, 48, 49, 50, 51, 52, 53, 54, 55, 56, 57, 58, 59, 60, 61, 62, 63, 64, 65, 66, 67, 68, 69, 70, 71, 72, 73, 74, 75, 76, 77, 78, 79, 80, 81, 82, 83, 84, 85, 86, 87, 88, 89, 90, 91, 92, 93, 94, 95, 96, 97, 98, 99, 100 percent or fold reduction in specificity for a non-CNS cells as compared to a wild-type AAV or control. In some embodiments, the modified AAV can have no measurable or detectable uptake and/or expression in one or more non-CNS cells.

[0306] In some embodiments, the AAV capsid protein in which the n-mer insert(s) and/or P motif(s), and/or double valine motifs are inserted are 80-100 (e.g., 80, 81, 82, 83, 84, 85, 86, 87, 88, 89, 90, 91, 92, 93, 94, 95, 96, 97, 98, 99, to/or 100) percent identical to any one of those set forth in International Patent Application Pub. WO 2018119330.

### Methods of Generating Engineered AAV Capsids

[0307] Also provided herein are methods of generating engineered AAV capsids. The engineered AAV capsid variants can be variants of wild-type AAV capsids. FIGS. 6A-8 can illustrate various embodiments of methods capable of generating engineered AAV capsids described herein. Generally, an AAV capsid library can be generated by expressing engineered capsid vectors each containing an engineered AAV capsid polynucleotide previously described in an appropriate AAV producer cell line. See e.g., FIG. 8. It will be appreciated that although FIG. 8 shows a helper-dependent method of AAV particle production, it will be appreciated that this can be done via a helper-free method as well. This can generate an AAV capsid library that can contain one more desired cell-specific engineered AAV capsid variant. As shown in FIG. 6 the AAV capsid library can be administered to various non-human animals for a first round of mRNA-based selection. As shown in FIG. 1, the transduction process by AAVs and related vectors can result in the production of an mRNA molecule that is reflective of the genome of the virus that transduced the cell. As is at least demonstrated in the Examples herein, mRNA based-selection can be more specific and effective to determine a virus particle capable of functionally transducing a cell because it is based on the functional product produced as opposed to just detecting the presence of a virus particle in the cell by measuring the presence of viral DNA.

[0308] After first-round administration, one or more engineered AAV virus particles having a desired capsid variant can then be used to form a filtered AAV capsid library. Desirable AAV virus particles can be identified by measuring the mRNA expression of the capsid variants and determining which variants are highly expressed in the desired cell type(s) as compared to non-desired cells type(s). Those that are highly expressed in the desired cell, tissue, and/or organ type are the desired AAV capsid variant particles. In some embodiments, the AAV capsid variant encoding polynucleotide is under control of a tissue-specific promoter that has selective activity in the desired cell, tissue, or organ.

[0309] The engineered AAV capsid variant particles identified from the first round can then be administered to various non-human animals. In some embodiments, the animals used in the second round of selection and identification are not the same as those animals used for first round selection and identification. Similar to round 1, after administration the top expressing variants in the desired cell, tissue, and/or organ type(s) can be identified by measuring viral mRNA expression in the cells. The top variants identified after round two can then be optionally barcoded and optionally pooled. In some embodiments, top variants from the second round can then be administered to a non-human primate to identify the top cell-specific variant(s), particularly if the end use for the top variant is in humans. Administration at each round can be systemic.

[0310] In some embodiments, the method of generating an AAV capsid variant can include the steps of: (a) expressing a vector system described herein that contains an engineered AAV capsid polynucleotide in a cell to produce engineered AAV virus particle capsid variants; (b) harvesting the engineered AAV virus particle capsid variants produced in step (a); (c) administering engineered AAV virus particle capsid variants to one or more first subjects, wherein the engineered AAV virus particle capsid variants are produced by expressing an engineered AAV capsid variant vector or system thereof in a cell and harvesting the engineered AAV virus particle capsid variants produced by the cell; and (d) identifying one or more engineered AAV capsid variants produced at a significantly high level by one or more specific cells or specific cell types in the one or more first subjects. In this context, “significantly high” can refer to a titer that can range from between about 2×10¹¹ to about 6×10¹² vector genomes per 15 cm dish.

[0311] The method can further include the steps of: (e) administering some or all engineered AAV virus particle capsid variants identified in step (d) to one or more second subjects; and (f) identifying one or more engineered AAV virus particle capsid variants produced at a significantly high level in one or more specific cells or specific cell types in the one or more second subjects. The cell in step (a) can be a prokaryotic cell or a eukaryotic cell. In some embodiments, the administration in step (c), step (e), or both is systemic. In some embodiments, one or more first subjects, one or more second subjects, or both, are non-human mammals. In some embodiments, one or more first subjects, one or more second subjects, or both, are each independently selected from the group consisting of: a wild-type non-human mammal, a humanized non-human mammal, a disease-specific non-human mammal model, and a non-human primate.

### Engineered Vectors and Vector Systems

[0312] Also provided herein are vectors and vector systems that can contain one or more of the engineered polynucleotides, (e.g., an AAV capsid polynucleotide) described herein. As used in this context, engineered viral (e.g., AAV) capsid polynucleotides refers to any one or more of the polynucleotides described herein capable of encoding an engineered viral (e.g., AAV) capsid as described elsewhere herein and/or polynucleotide(s) capable of encoding one or more engineered viral (e.g., AAV) capsid proteins described elsewhere herein. Further, where the vector includes an engineered viral (e.g., AAV) capsid polynucleotide described herein, the vector can also be referred to and considered an engineered vector or system thereof although not specifically noted as such. In embodiments, the vector can contain one or more polynucleotides encoding one or more elements of an engineered viral (e.g., AAV) capsid described herein. The vectors can be useful in producing bacterial, fungal, yeast, plant cells, animal cells, and transgenic animals that can express one or more components of the engineered viral (e.g., AAV) capsid described herein. Within the scope of this disclosure are vectors containing one or more of the polynucleotide sequences described herein. One or more of the polynucleotides that are part of the engineered viral (e.g., AAV) capsid and system thereof described herein can be included in a vector or vector system.

[0313] In some embodiments, the vector can include an engineered viral (e.g., AAV) capsid polynucleotide having a 3′ polyadenylation signal. In some embodiments, the 3′ polyadenylation is an SV40 polyadenylation signal. In some embodiments the vector does not have splice regulatory elements. In some embodiments, the vector includes one or more minimal splice regulatory elements. In some embodiments, the vector can further include a modified splice regulatory element, wherein the modification inactivates the splice regulatory element. In some embodiments, the modified splice regulatory element is a polynucleotide sequence sufficient to induce splicing, between a rep protein polynucleotide and the engineered viral (e.g., AAV) capsid protein variant polynucleotide. In some embodiments, the polynucleotide sequence can be sufficient to induce splicing is a splice acceptor or a splice donor. In some embodiments, the viral (e.g., AAV) capsid polynucleotide is an engineered viral (e.g., AAV) capsid polynucleotide as described elsewhere herein.

[0314] The vectors and/or vector systems can be used, for example, to express one or more of the engineered viral (e.g., AAV) capsid polynucleotides in a cell, such as a producer cell, to produce engineered viral (e.g., AAV) particles containing an engineered viral (e.g., AAV) capsid described elsewhere herein. Other uses for the vectors and vector systems described herein are also within the scope of this disclosure. In general, and throughout this specification, the term is a tool that allows or facilitates the transfer of an entity from one environment to another. In some contexts which will be appreciated by those of ordinary skill in the art, “vector” can be a term of art to refer to a nucleic acid molecule capable of transporting another nucleic acid to which it has been linked. A vector can be a replicon, such as a plasmid, phage, or cosmid, into which another DNA segment may be inserted so as to bring about the replication of the inserted segment. Generally, a vector is capable of replication when associated with the proper control elements.

[0315] Vectors include, but are not limited to, nucleic acid molecules that are single-stranded, double-stranded, or partially double-stranded; nucleic acid molecules that comprise one or more free ends, no free ends (e.g., circular); nucleic acid molecules that comprise DNA, RNA, or both; and other varieties of polynucleotides known in the art. One type of vector is a “plasmid,” which refers to a circular double stranded DNA loop into which additional DNA segments can be inserted, such as by standard molecular cloning techniques. Another type of vector is a viral vector, wherein virally-derived DNA or RNA sequences are present in the vector for packaging into a virus (e.g., retroviruses, replication defective retroviruses, adenoviruses, replication defective adenoviruses, and adeno-associated viruses (AAVs)). Viral vectors also include polynucleotides carried by a virus for transfection into a host cell. Certain vectors are capable of autonomous replication in a host cell into which they are introduced (e.g., bacterial vectors having a bacterial origin of replication and episomal mammalian vectors). Other vectors (e.g., non-episomal mammalian vectors) are integrated into the genome of a host cell upon introduction into the host cell, and thereby are replicated along with the host genome. Moreover, certain vectors are capable of directing the expression of genes to which they are operatively-linked. Such vectors are referred to herein as “expression vectors.” Common expression vectors of utility in recombinant DNA techniques are often in the form of plasmids.

[0316] Recombinant expression vectors can be composed of a nucleic acid (e.g., a polynucleotide) of the invention in a form suitable for expression of the nucleic acid in a host cell, which means that the recombinant expression vectors include one or more regulatory elements, which can be selected on the basis of the host cells to be used for expression, that is operatively-linked to the nucleic acid sequence to be expressed. Within a recombinant expression vector, “operably linked” and “operatively-linked” are used interchangeably herein and further defined elsewhere herein. In the context of a vector, the term “operably linked” is intended to mean that the nucleotide sequence of interest is linked to the regulatory element(s) in a manner that allows for expression of the nucleotide sequence (e.g., in an in vitro transcription/translation system or in a host cell when the vector is introduced into the host cell). Advantageous vectors include adeno-associated viruses, and types of such vectors can also be selected for targeting particular types of cells, such as those engineered viral (e.g., AAV) vectors containing an engineered viral (e.g., AAV) capsid polynucleotide with a desired cell-specific tropism. These and other embodiments of the vectors and vector systems are described elsewhere herein.

[0317] In some embodiments, the vector can be a bicistronic vector. In some embodiments, a bicistronic vector can be used for one or more elements of the engineered viral (e.g., AAV) capsid system described herein. In some embodiments, expression of elements of the engineered viral (e.g., AAV) capsid system described herein can be driven by a suitable constitutive or tissue specific promoter. Where the element of the engineered viral (e.g., AAV) capsid system is an RNA, its expression can be driven by a Pol III promoter, such as a U6 promoter. In some embodiments, the two are combined.

### Cell-Based Vector Amplification and Expression

[0318] Vectors can be designed for expression of one or more elements of the engineered targeting moieties, polypeptides, viral (e.g., AAV) capsid system described herein (e.g., nucleic acid transcripts, proteins, enzymes, and combinations thereof), etc. in a suitable host cell. In some embodiments, the suitable host cell is a prokaryotic cell. Suitable host cells include, but are not limited to, bacterial cells, yeast cells, insect cells, and mammalian cells. The vectors can be viral-based or non-viral based. In some embodiments, the suitable host cell is a eukaryotic cell. In some embodiments, the suitable host cell is a suitable bacterial cell. Suitable bacterial cells include, but are not limited to, bacterial cells from the bacteria of the species Escherichia coli. Many suitable strains of E. coli are known in the art for expression of vectors. These include, but are not limited to Pir1, Stbl2, Stbl3, Stbl4, TOP10, XL1 Blue, and XL10 Gold. In some embodiments, the host cell is a suitable insect cell. Suitable insect cells include those from Spodoptera frugiperda. Suitable strains of S. frugiperda cells include, but are not limited to, Sf9 and Sf21. In some embodiments, the host cell is a suitable yeast cell. In some embodiments, the yeast cell can be from Saccharomyces cerevisiae. In some embodiments, the host cell is a suitable mammalian cell. Many types of mammalian cells have been developed to express vectors. Suitable mammalian cells include, but are not limited to, HEK293, Chinese Hamster Ovary Cells (CHOs), mouse myeloma cells, HeLa, U20S, A549, HT1080, CAD, P19, NIH 3T3, L929, N2a, MCF-7, Y79, SO-Rb50, HepG G2, DIKX-X11, J558L, Baby hamster kidney cells (BHK), and chicken embryo fibroblasts (CEFs). Suitable host cells are discussed further in Goeddel, GENE EXPRESSION TECHNOLOGY: METHODS IN ENZYMOLOGY 185, Academic Press, San Diego, Calif. (1990).

[0319] In some embodiments, the vector can be a yeast expression vector. Examples of vectors for expression in yeast Saccharomyces cerevisiae include pYepSec1 (Baldari, et al., 1987. EMBO J. 6: 229-234), pMFa (Kuijan and Herskowitz, 1982. Cell 30: 933-943), pJRY88 (Schultz et al., 1987. Gene 54: 113-123), pYES2 (Invitrogen Corporation, San Diego, Calif.), and picZ (InVitrogen Corp, San Diego, Calif.). As used herein, a “yeast expression vector” refers to a nucleic acid that contains one or more sequences encoding an RNA and/or polypeptide and may further contain any desired elements that control the expression of the nucleic acid(s), as well as any elements that enable the replication and maintenance of the expression vector inside the yeast cell. Many suitable yeast expression vectors and features thereof are known in the art; for example, various vectors and techniques are illustrated in in Yeast Protocols, 2nd edition, Xiao, W., ed. (Humana Press, New York, 2007) and Buckholz, R. G. and Gleeson, M.A. (1991) Biotechnology (NY) 9(11): 1067-72. Yeast vectors can contain, without limitation, a centromeric (CEN) sequence, an autonomous replication sequence (ARS), a promoter, such as an RNA Polymerase III promoter, operably linked to a sequence or gene of interest, a terminator such as an RNA polymerase III terminator, an origin of replication, and a marker gene (e.g., auxotrophic, antibiotic, or other selectable markers). Examples of expression vectors for use in yeast may include plasmids, yeast artificial chromosomes, 2μ plasmids, yeast integrative plasmids, yeast replicative plasmids, shuttle vectors, and episomal plasmids.

[0320] In some embodiments, the vector is a baculovirus vector or expression vector and can be suitable for expression of polynucleotides and/or proteins in insect cells. Baculovirus vectors available for expression of proteins in cultured insect cells (e.g., SF9 cells) include the pAc series (Smith, et al., 1983. Mol. Cell. Biol. 3: 2156-2165) and the pVL series (Lucklow and Summers, 1989. Virology 170: 31-39). rAAV (recombinant Adeno-associated viral) vectors are preferably produced in insect cells, e.g., Spodoptera frugiperda Sf9 insect cells, grown in serum-free suspension culture. Serum-free insect cells can be purchased from commercial vendors, e.g., Sigma Aldrich (EX-CELL 405).

[0321] In some embodiments, the vector is a mammalian expression vector. In some embodiments, the mammalian expression vector is capable of expressing one or more polynucleotides and/or polypeptides in a mammalian cell. Examples of mammalian expression vectors include, but are not limited to, pCDM8 (Seed, 1987. Nature 329: 840) and pMT2PC (Kaufman, et al., 1987. EMBO J. 6: 187-195). The mammalian expression vector can include one or more suitable regulatory elements capable of controlling expression of the one or more polynucleotides and/or proteins in the mammalian cell. For example, commonly used promoters are derived from polyoma, adenovirus 2, cytomegalovirus, simian virus 40, and others disclosed herein and known in the art. More detail on suitable regulatory elements is described elsewhere herein.

[0322] For other suitable expression vectors and vector systems for both prokaryotic and eukaryotic cells see, e.g., Chapters 16 and 17 of Sambrook, et al., MOLECULAR CLONING: A LABORATORY MANUAL. 2nd ed., Cold Spring Harbor Laboratory, Cold Spring Harbor Laboratory Press, Cold Spring Harbor, N.Y., 1989.

[0323] In some embodiments, the recombinant mammalian expression vector is capable of directing expression of the nucleic acid preferentially in a particular cell type (e.g., tissue-specific regulatory elements are used to express the nucleic acid). Tissue-specific regulatory elements are known in the art. Non-limiting examples of suitable tissue-specific promoters include the albumin promoter (liver-specific; Pinkert, et al., 1987. Genes Dev. 1: 268-277), lymphoid-specific promoters (Calame and Eaton, 1988. Adv. Immunol. 43: 235-275), in particular promoters of T cell receptors (Winoto and Baltimore, 1989. EMBO J. 8: 729-733) and immunoglobulins (Baneiji, et al., 1983. Cell 33: 729-740; Queen and Baltimore, 1983. Cell 33: 741-748), neuron-specific promoters (e.g., the neurofilament promoter; Byme and Ruddle, 1989. Proc. Natl. Acad. Sci. USA 86: 5473-5477), pancreas-specific promoters (Edlund, et al., 1985. Science 230: 912-916), and mammary gland-specific promoters (e.g., milk whey promoter; U.S. Pat. No. 4,873,316 and European Application Publication No. 264,166). Developmentally-regulated promoters are also encompassed, e.g., the murine hox promoters (Kessel and Gruss, 1990. Science 249: 374-379) and the a-fetoprotein promoter (Campes and Tilghman, 1989. Genes Dev. 3: 537-546). With regards to these prokaryotic and eukaryotic vectors, mention is made of U.S. Pat. No. 6,750,059, the contents of which are incorporated by reference herein in their entirety. Other embodiments can utilize viral vectors, with regards to which mention is made of U.S. patent application Ser. No. 13/092,085, the contents of which are incorporated by reference herein in their entirety. Tissue-specific regulatory elements are known in the art and in this regard, mention is made of U.S. Pat. No. 7,776,321, the contents of which are incorporated by reference herein in their entirety. In some embodiments, a regulatory element can be operably linked to one or more elements of an engineered targeting moiety, polypeptide, viral (e.g., AAV) capsid system so as to drive expression of the one or more elements of the engineered targeting moiety, polypeptide, viral (e.g., AAV) capsid system described herein.

[0324] Vectors may be introduced and propagated in a prokaryote or prokaryotic cell. In some embodiments, a prokaryote is used to amplify copies of a vector to be introduced into a eukaryotic cell or as an intermediate vector in the production of a vector to be introduced into a eukaryotic cell (e.g., amplifying a plasmid as part of a viral vector packaging system). In some embodiments, a prokaryote is used to amplify copies of a vector and express one or more nucleic acids, such as to provide a source of one or more proteins for delivery to a host cell or host organism.

[0325] In some embodiments, the vector can be a fusion vector or fusion expression vector. In some embodiments, fusion vectors add a number of amino acids to a protein encoded therein, such as to the amino terminus, carboxy terminus, or both of a recombinant protein. Such fusion vectors can serve one or more purposes, such as: (i) to increase expression of recombinant protein; (ii) to increase the solubility of the recombinant protein; and (iii) to aid in the purification of the recombinant protein by acting as a ligand in affinity purification. In some embodiments, expression of polynucleotides (such as non-coding polynucleotides) and proteins in prokaryotes can be carried out in Escherichia coli with vectors containing constitutive or inducible promoters directing the expression of either fusion or non-fusion polynucleotides and/or proteins. In some embodiments, the fusion expression vector can include a proteolytic cleavage site, which can be introduced at the junction of the fusion vector backbone or other fusion moiety and the recombinant polynucleotide or protein to enable separation of the recombinant polynucleotide or protein from the fusion vector backbone or other fusion moiety subsequent to purification of the fusion polynucleotide or protein. Such enzymes, and their cognate recognition sequences, include Factor Xa, thrombin and enterokinase. Example fusion expression vectors include pGEX (Pharmacia Biotech Inc; Smith and Johnson, 1988. Gene 67: 31-40), pMAL (New England Biolabs, Beverly, Mass.) and pRIT5 (Pharmacia, Piscataway, N.J.) that fuse glutathione S-transferase (GST), maltose E binding protein, or protein A, respectively, to the target recombinant protein. Examples of suitable inducible non-fusion E. coli expression vectors include pTrc (Amrann et al., (1988) Gene 69:301-315) and pET 11d (Studier et al., GENE EXPRESSION TECHNOLOGY: METHODS IN ENZYMOLOGY 185, Academic Press, San Diego, Calif. (1990) 60-89).

[0326] In some embodiments, one or more vectors driving expression of one or more elements of an engineered targeting moiety, polypeptide, viral (e.g., AAV) capsid system described herein are introduced into a host cell such that expression of the elements of the engineered delivery system described herein direct formation of an engineered targeting moiety, polypeptide, viral (e.g., AAV) capsid system described herein (including but not limited to an engineered gene transfer agent particle, which is described in greater detail elsewhere herein). For example, different elements of the engineered targeting moiety, polypeptide, viral (e.g., AAV) capsid system described herein can each be operably linked to separate regulatory elements on separate vectors. RNA(s) of different elements of the engineered delivery system described herein can be delivered to an animal or mammal or cell thereof to produce an animal or mammal or cell thereof that constitutively or inducibly or conditionally expresses different elements of the engineered targeting moiety, polypeptide, viral (e.g., AAV) capsid system described herein that incorporates one or more elements of the engineered targeting moiety, polypeptide, viral (e.g., AAV) capsid system described herein or contains one or more cells that incorporates and/or expresses one or more elements of the engineered targeting moiety, polypeptide, viral (e.g., AAV) capsid system described herein.

[0327] In some embodiments, two or more of the elements expressed from the same or different regulatory element(s), can be combined in a single vector, with one or more additional vectors providing any components of the system not included in the first vector. Engineered targeting moiety, polypeptide, viral (e.g., AAV) capsid system polynucleotides that are combined in a single vector may be arranged in any suitable orientation, such as one element located 5′ with respect to (“upstream” of) or 3′ with respect to (“downstream” of) a second element. The coding sequence of one element may be located on the same or opposite strand of the coding sequence of a second element, and oriented in the same or opposite direction. In some embodiments, a single promoter drives expression of a transcript encoding one or more engineered targeting moiety, polypeptide, viral (e.g., AAV) capsid polypeptides, embedded within one or more intron sequences (e.g., each in a different intron, two or more in at least one intron, or all in a single intron). In some embodiments, the engineered targeting moiety, polypeptide, viral (e.g., AAV) capsid polynucleotides can be operably linked to and expressed from the same promoter.

### Vector Features

[0328] The vectors can include additional features that can confer one or more functionalities to the vector, the polynucleotide to be delivered, a virus particle produced there from, or polypeptide expressed thereof. Such features include, but are not limited to, regulatory elements, selectable markers, molecular identifiers (e.g., molecular barcodes), stabilizing elements, and the like. It will be appreciated by those skilled in the art that the design of the expression vector and additional features included can depend on such factors as the choice of the host cell to be transformed, the level of expression desired, etc.

### Regulatory Elements

[0329] In embodiments, the polynucleotides and/or vectors thereof described herein (such as the engineered targeting moiety, polypeptide, viral (e.g., AAV) capsid polynucleotides of the present invention) can include one or more regulatory elements that can be operatively linked to the polynucleotide. The term “regulatory element” is intended to include promoters, enhancers, internal ribosomal entry sites (IRES), and other expression control elements (e.g., transcription termination signals, such as polyadenylation signals and poly-U sequences). Such regulatory elements are described, for example, in Goeddel, GENE EXPRESSION TECHNOLOGY: METHODS IN ENZYMOLOGY 185, Academic Press, San Diego, Calif. (1990). Regulatory elements include those that direct constitutive expression of a nucleotide sequence in many types of host cell and those that direct expression of the nucleotide sequence only in certain host cells (e.g., tissue-specific regulatory sequences). A tissue-specific promoter can direct expression primarily in a desired tissue and/or cells of interest, such as CNS cells and/or particular cell types therein (e.g., neurons and/or supporting cells (e.g., Schwan, astrocytes, glial cells, microglial cells, and/or the like). Regulatory elements may also direct expression in a temporal-dependent manner, such as in a cell-cycle dependent or developmental stage-dependent manner, which may or may not also be tissue or cell-type specific. In some embodiments, a vector comprises one or more pol III promoter (e.g., 1, 2, 3, 4, 5, or more pol III promoters), one or more pol II promoters (e.g., 1, 2, 3, 4, 5, or more pol II promoters), one or more pol I promoters (e.g., 1, 2, 3, 4, 5, or more pol I promoters), or combinations thereof. Examples of pol III promoters include, but are not limited to, U6 and H1 promoters. Examples of pol II promoters include, but are not limited to, the retroviral Rous sarcoma virus (RSV) LTR promoter (optionally with the RSV enhancer), the cytomegalovirus (CMV) promoter (optionally with the CMV enhancer) (see, e.g., Boshart et al, Cell, 41:521-530 (1985)), the SV40 promoter, the dihydrofolate reductase promoter, the J3-actin promoter, the phosphoglycerol kinase (PGK) promoter, and the EF1α promoter. Also encompassed by the term “regulatory element” are enhancer elements, such as WPRE; CMV enhancers; the R-U5′ segment in LTR of HTLV-I (Mol. Cell. Biol., Vol. 8(1), p. 466-472, 1988); SV40 enhancer; and the intron sequence between exons 2 and 3 of rabbit β-globin (Proc. Natl. Acad. Sci. USA., Vol. 78(3), p. 1527-31, 1981).

[0330] In some embodiments, the regulatory sequence can be a regulatory sequence described in U.S. Pat. No. 7,776,321, U.S. Pat. Pub. No. 2011/0027239, and PCT publication WO 2011/028929, the contents of which are incorporated by reference herein in their entirety. In some embodiments, the vector can contain a minimal promoter. In some embodiments, the minimal promoter is the Mecp2 promoter, tRNA promoter, or U6. In a further embodiment, the minimal promoter is tissue specific. In some embodiments, the length of the vector polynucleotide the minimal promoters and polynucleotide sequences is less than 4.4 Kb.

[0331] To express a polynucleotide, the vector can include one or more transcriptional and/or translational initiation regulatory sequences, e.g., promoters, that direct the transcription of the gene and/or translation of the encoded protein in a cell. In some embodiments a constitutive promoter may be employed. Suitable constitutive promoters for mammalian cells are generally known in the art and include, but are not limited to SV40, CAG, CMV, EF-1α, β-actin, RSV, and PGK. Suitable constitutive promoters for bacterial cells, yeast cells, and fungal cells are generally known in the art, such as a T-7 promoter for bacterial expression and an alcohol dehydrogenase promoter for expression in yeast.

[0332] In some embodiments, the regulatory element can be a regulated promoter. “Regulated promoter” refers to promoters that direct gene expression not constitutively, but in a temporally- and/or spatially-regulated manner, and includes tissue-specific, tissue-preferred and inducible promoters. In some embodiments, the regulated promoter is a tissue specific promoter as previously discussed elsewhere herein. Regulated promoters include conditional promoters and inducible promoters. In some embodiments, conditional promoters can be employed to direct expression of a polynucleotide in a specific cell type, under certain environmental conditions, and/or during a specific state of development. Suitable tissue specific promoters can include, but are not limited to, CNS tissue and cell specific promoters.

[0333] Suitable neuronal tissue/cell specific promoters include, but are not limited to, GFAP promoter (astrocytes), SYN1 promoter (neurons), and NSE/RU5′ (mature neurons).

[0334] Other suitable CNS specific promoters can include, but are not limited to, neuroactive peptide cholecystokinin (CCK) (see e.g., Chhatawl et al. Gene Therapy volume 14, pages 575-583(2007)), a brain specific DNA MiniPromoter (such as any of those identified for brain or pan-neronal expression as in de Leeuw et al. Mol. Therapy. 1(5): 2014. doi:10.1038/mtm.2013.5), myelin basic promoter (MBP) (see e.g., von Jonquieres, G., Mersmann, N., Klugmann, C. B., Harasta, A. E., Lutz, B., Teahan, O., et al. (2013). Glial promoter selectivity following AAV-delivery to the immature brain. PLoS One 8 (6), e65646. doi: 10.1371/journal.pone.0065646), glial fibrillary acid protein (GFAP) for expression in astrocytes (see e.g., Smith-Arica, J. R., Morelli, A. E., Larregina, A. T., Smith, J., Lowenstein, P. R., Castro, M. G. (2000). Cell-type-specific and regulatable transgenesis in the adult brain: adenovirus-encoded combined transcriptional targeting and inducible transgene expression. Mol. Ther. 2 (6), 579-587. doi: 10.1006/mthe.2000.0215 and Lee, Y., Messing, A., Su, M., Brenner, M. (2008). GFAP promoter elements required for region-specific and astrocyte-specific expression. Glia 56 (5), 481-493. doi: 10.1002/glia.20622), human myelin associated glycoprotein promoter (full-length or truncated) (see e.g., von Jonquieres, G., Frohlich, D., Klugmann, C. B., Wen, X., Harasta, A. E., Ramkumar, R., et al. (2016). Recombinant human myelin-associated glycoprotein promoter drives selective AAV-mediated transgene expression in oligodendrocytes. Front. Mol. Neurosci. 9, 13. doi: 10.3389/fnmol.2016.00013), F4/80 promoter (see e.g., Rosario, A. M., Cruz, P. E., Ceballos-Diaz, C., Strickland, M. R., Siemienski, Z., Pardo, M., et al. (2016). Microglia-specific targeting by novel capsid-modified AAV6 vectors. Mol. Ther. Methods Clin. Dev. 3, 16026. doi: 10.1038/mtm.2016.26), phosphate-activated glutaminase (PAG) or the vesicular glutamate transporter (vGLUT) promoter (for about 90% glutamatergic neuron-specific expression) (see e.g., Rasmussen, M., Kong, L., Zhang, G. R., Liu, M., Wang, X., Szabo, G., et al. (2007). Glutamatergic or GABAergic neuron-specific, long-term expression in neocortical neurons from helper virus-free HSV-1 vectors containing the phosphate-activated glutaminase, vesicular glutamate transporter-1, or glutamic acid decarboxylase promoter. Brain Res. 1144, 19-32. doi: 10.1016/j.brainres.2007.01.125), glutamic acid decarboxylase (GAD) promoter (for about 90% GABAergic neuron-specific expression) (see e.g., Rasmussen, M., Kong, L., Zhang, G. R., Liu, M., Wang, X., Szabo, G., et al. (2007). Glutamatergic or GABAergic neuron-specific, long-term expression in neocortical neurons from helper virus-free HSV-1 vectors containing the phosphate-activated glutaminase, vesicular glutamate transporter-1, or glutamic acid decarboxylase promoter. Brain Res. 1144, 19-32. doi: 10.1016/j.brainres.2007.01.125), MeCP2 promoter (see e.g., Gray et al. Hum Gene Ther. 2011 September; 22(9):1143-53. doi: 10.1089/hum.2010.245), and retinoblastoma gene promoter (see e.g., Jiang et al., J. Biol. Chem. 2001. 276, 593-600).

[0335] Other tissue and/or cell specific promoters are discussed elsewhere herein and can be generally known in the art and are within the scope of this disclosure.

[0336] Inducible/conditional promoters can be positively inducible/conditional promoters (e.g., a promoter that activates transcription of the polynucleotide upon appropriate interaction with an activated activator, or an inducer (compound, environmental condition, or other stimulus) or a negative/conditional inducible promoter (e.g., a promoter that is repressed (e.g., bound by a repressor) until the repressor condition of the promotor is removed (e.g. inducer binds a repressor bound to the promoter stimulating release of the promoter by the repressor or removal of a chemical repressor from the promoter environment).The inducer can be a compound, environmental condition, or other stimulus. Thus, inducible/conditional promoters can be responsive to any suitable stimuli such as chemical, biological, or other molecular agents, temperature, light, and/or pH. Suitable inducible/conditional promoters include, but are not limited to, Tet-On, Tet-Off, Lac promoter, pBad, AlcA, LexA, Hsp70 promoter, Hsp90 promoter, pDawn, XVE/OlexA, GVG, and pOp/LhGR.

[0337] Where expression in a plant cell is desired, the components of the engineered targeting moiety, polypeptide, viral (e.g., AAV) capsid system described herein are typically placed under control of a plant promoter, i.e., a promoter operable in plant cells. The use of different types of promoters is envisaged. In some embodiments, inclusion of an engineered targeting moiety, polypeptide, viral (e.g., AAV) capsid system vector in a plant can be for AAV vector production purposes.

[0338] A constitutive plant promoter is a promoter that is able to express the open reading frame (ORF) that it controls in all or nearly all of the plant tissues during all or nearly all developmental stages of the plant (referred to as “constitutive expression”). One non-limiting example of a constitutive promoter is the cauliflower mosaic virus 35S promoter. Different promoters may direct the expression of a gene in different tissues or cell types, or at different stages of development, or in response to different environmental conditions. In particular embodiments, one or more of the engineered targeting moiety, polypeptide, viral (e.g., AAV) capsid system components are expressed under the control of a constitutive promoter, such as the cauliflower mosaic virus 35S promoter issue-preferred promoters can be utilized to target enhanced expression in certain cell types within a particular plant tissue, for instance vascular cells in leaves or roots or in specific cells of the seed. Examples of particular promoters for use in the engineered targeting moiety, polypeptide, viral (e.g., AAV) capsid system are found in Kawamata et al., (1997) Plant Cell Physiol 38:792-803; Yamamoto et al., (1997) Plant J 12:255-65; Hire et al., (1992) Plant Mol Biol 20:207-18; Kuster et al., (1995) Plant Mol Biol 29:759-72; and Capana et al., (1994) Plant Mol Biol 25:681-91.

[0339] Examples of promoters that are inducible and that can allow for spatiotemporal control of gene editing or gene expression may use a form of energy. The form of energy may include but is not limited to sound energy, electromagnetic radiation, chemical energy and/or thermal energy. Examples of inducible systems include tetracycline inducible promoters (Tet-On or Tet-Off), small molecule two-hybrid transcription activations systems (FKBP, ABA, etc.), or light inducible systems (Phytochrome, LOV domains, or cryptochrome)., such as a Light Inducible Transcriptional Effector (LITE) that direct changes in transcriptional activity in a sequence-specific manner. The components of a light inducible system may include one or more elements of the engineered targeting moiety, polypeptide, viral (e.g., AAV) capsid system described herein, a light-responsive cytochrome heterodimer (e.g., from Arabidopsis thaliana), and a transcriptional activation/repression domain. In some embodiments, the vector can include one or more of the inducible DNA binding proteins provided in PCT publication WO 2014/018423 and US Publications, 2015/0291966, 2017/0166903, 2019/0203212, which describe e.g., embodiments of inducible DNA binding proteins and methods of use and can be adapted for use with the present invention.

[0340] In some embodiments, transient or inducible expression can be achieved by including, for example, chemical-regulated promotors, i.e., whereby the application of an exogenous chemical induces gene expression. Modulation of gene expression can also be obtained by including a chemical-repressible promoter, where application of the chemical represses gene expression. Chemical-inducible promoters include, but are not limited to, the maize ln2-2 promoter, activated by benzene sulfonamide herbicide safeners (De Veylder et al., (1997) Plant Cell Physiol 38:568-77), the maize GST promoter (GST-ll-27, WO93/01294), activated by hydrophobic electrophilic compounds used as pre-emergent herbicides, and the tobacco PR-1 a promoter (Ono et al., (2004) Biosci Biotechnol Biochem 68:803-7) activated by salicylic acid. Promoters which are regulated by antibiotics, such as tetracycline-inducible and tetracycline-repressible promoters (Gatz et al., (1991) Mol Gen Genet 227:229-37; U.S. Pat. Nos. 5,814,618 and 5,789,156) can also be used herein.

[0341] In some embodiments, the vector or system thereof can include one or more elements capable of translocating and/or expressing an engineered targeting moiety, polypeptide, viral (e.g., AAV) capsid polynucleotide to/in a specific cell component or organelle. Such organelles can include, but are not limited to, nucleus, ribosome, endoplasmic reticulum, golgi apparatus, chloroplast, mitochondria, vacuole, lysosome, cytoskeleton, plasma membrane, cell wall, peroxisome, centrioles, etc.

### Selectable Markers and Tags

[0342] One or more of the engineered targeting moiety, polypeptide, viral (e.g., AAV) capsid polynucleotides can be operably linked, fused to, or otherwise modified to include a polynucleotide that encodes or is a selectable marker or tag, which can be a polynucleotide or polypeptide. In some embodiments, the polypeptide encoding a polypeptide selectable marker can be incorporated in the engineered targeting moiety, polypeptide, viral (e.g., AAV) capsid system polynucleotide such that the selectable marker polypeptide, when translated, is inserted between two amino acids between the N- and C-terminus of the engineered targeting moiety, polypeptide, viral (e.g., AAV) capsid polypeptide or at the N- and/or C-terminus of the engineered targeting moiety, polypeptide, viral (e.g., AAV) capsid polypeptide. In some embodiments, the selectable marker or tag is a polynucleotide barcode or unique molecular identifier (UMI).

[0343] It will be appreciated that the polynucleotide encoding such selectable markers or tags can be incorporated into a polynucleotide encoding one or more components of the engineered targeting moiety, polypeptide, viral (e.g., AAV) capsid system described herein in an appropriate manner to allow expression of the selectable marker or tag. Such techniques and methods are described elsewhere herein and will be instantly appreciated by one of ordinary skill in the art in view of this disclosure. Many such selectable markers and tags are generally known in the art and are intended to be within the scope of this disclosure.

[0344] Suitable selectable markers and tags include, but are not limited to, affinity tags, such as chitin binding protein (CBP), maltose binding protein (MBP), glutathione-S-transferase (GST), poly(His) tag; solubilization tags such as thioredoxin (TRX) and poly(NANP), MBP, and GST; chromatography tags such as those consisting of polyanionic amino acids, such as FLAG-tag; epitope tags such as V5-tag, Myc-tag, HA-tag and NE-tag; protein tags that can allow specific enzymatic modification (such as biotinylation by biotin ligase) or chemical modification (such as reaction with FlAsH-EDT2 for fluorescence imaging), DNA and/or RNA segments that contain restriction enzyme or other enzyme cleavage sites; DNA segments that encode products that provide resistance against otherwise toxic compounds including antibiotics, such as, spectinomycin, ampicillin, kanamycin, tetracycline, Basta, neomycin phosphotransferase II (NEO), hygromycin phosphotransferase (HPT)) and the like; DNA and/or RNA segments that encode products that are otherwise lacking in the recipient cell (e.g., tRNA genes, auxotrophic markers); DNA and/or RNA segments that encode products which can be readily identified (e.g., phenotypic markers such as β-galactosidase, GUS; fluorescent proteins such as green fluorescent protein (GFP), cyan (CFP), yellow (YFP), red (RFP), luciferase, and cell surface proteins); polynucleotides that can generate one or more new primer sites for PCR (e.g., the juxtaposition of two DNA sequences not previously juxtaposed), DNA sequences not acted upon or acted upon by a restriction endonuclease or other DNA modifying enzyme, chemical, etc.; epitope tags (e.g., GFP, FLAG- and His-tags), and, DNA sequences that make a molecular barcode or unique molecular identifier (UMI), DNA sequences required for a specific modification (e.g., methylation) that allows its identification. Other suitable markers will be appreciated by those of skill in the art.

[0345] Selectable markers and tags can be operably linked to one or more components of the engineered AAV capsid system described herein via suitable linker, such as a glycine or glycine serine linkers as short as GS or GG up to (GGGGG)₃ (SEQ ID NO: 315) or (GGGGS)₃ (SEQ ID NO: 316). Other suitable linkers are described elsewhere herein.

[0346] The vector or vector system can include one or more polynucleotides encoding one or more targeting moieties. In some embodiments, the targeting moiety encoding polynucleotides can be included in the vector or vector system, such as a viral vector system, such that they are expressed within and/or on the virus particle(s) produced such that the virus particles can be targeted to specific cells, tissues, organs, etc. In some embodiments, the targeting moiety encoding polynucleotides can be included in the vector or vector system such that the engineered targeting moiety, polypeptide, viral (e.g., AAV) capsid polynucleotide(s) and/or products expressed therefrom include the targeting moiety and can be targeted to specific cells, tissues, organs, etc. In some embodiments, such as non-viral carriers, the targeting moiety can be attached to the carrier (e.g., polymer, lipid, inorganic molecule etc.) and can be capable of targeting the carrier and any attached or associated engineered targeting moiety, polypeptide, viral (e.g., AAV) capsid polynucleotide(s) to specific cells, tissues, organs, etc.

### Cell-Free Vector and Polynucleotide Expression

[0347] In some embodiments, the polynucleotide encoding one or more features of the engineered targeting moiety, polypeptide, viral (e.g., AAV) capsid system can be expressed from a vector or suitable polynucleotide in a cell-free in vitro system. In other words, the polynucleotide can be transcribed and optionally translated in vitro. In vitro transcription/translation systems and appropriate vectors are generally known in the art and commercially available. Generally, in vitro transcription and in vitro translation systems replicate the processes of RNA and protein synthesis, respectively, outside of the cellular environment. Vectors and suitable polynucleotides for in vitro transcription can include T7, SP6, T3, promoter regulatory sequences that can be recognized and acted upon by an appropriate polymerase to transcribe the polynucleotide or vector.

[0348] In vitro translation can be stand-alone (e.g., translation of a purified polyribonucleotide) or linked/coupled to transcription. In some embodiments, the cell-free (or in vitro) translation system can include extracts from rabbit reticulocytes, wheat germ, and/or E. coli. The extracts can include various macromolecular components that are needed for translation of exogenous RNA (e.g., 70S or 80S ribosomes, tRNAs, aminoacyl-tRNA, synthetases, initiation, elongation factors, termination factors, etc.). Other components can be included or added during the translation reaction, including but not limited to, amino acids, energy sources (ATP, GTP), energy regenerating systems (creatine phosphate and creatine phosphokinase (eukaryotic systems)) (phosphoenol pyruvate and pyruvate kinase for bacterial systems), and other co-factors (Mg2+, K+, etc.). As previously mentioned, in vitro translation can be based on RNA or DNA starting material. Some translation systems can utilize an RNA template as starting material (e.g., reticulocyte lysates and wheat germ extracts). Some translation systems can utilize a DNA template as a starting material (e.g., E coli-based systems). In these systems transcription and translation are coupled and DNA is first transcribed into RNA, which is subsequently translated. Suitable standard and coupled cell-free translation systems are generally known in the art and are commercially available.

### Codon Optimization of Vector Polynucleotides

[0349] As described elsewhere herein, the polynucleotide encoding one or more embodiments of the engineered targeting moiety, polypeptide, viral (e.g., AAV) capsid system described herein can be codon optimized. In some embodiments, one or more polynucleotides contained in a vector (“vector polynucleotides”) described herein that are in addition to an optionally codon optimized polynucleotide encoding embodiments of the engineered targeting moiety, polypeptide, viral (e.g., AAV) capsid system described herein can be codon optimized. In general, codon optimization refers to a process of modifying a nucleic acid sequence for enhanced expression in the host cells of interest by replacing at least one codon (e.g., about or more than about 1, 2, 3, 4, 5, 10, 15, 20, 25, 50, or more codons) of the native sequence with codons that are more frequently or most frequently used in the genes of that host cell while maintaining the native amino acid sequence. Various species exhibit particular bias for certain codons of a particular amino acid. Codon bias (differences in codon usage between organisms) often correlates with the efficiency of translation of messenger RNA (mRNA), which is in turn believed to be dependent on, among other things, the properties of the codons being translated and the availability of particular transfer RNA (tRNA) molecules. The predominance of selected tRNAs in a cell is generally a reflection of the codons used most frequently in peptide synthesis. Accordingly, genes can be tailored for optimal gene expression in a given organism based on codon optimization. Codon usage tables are readily available, for example, at the “Codon Usage Database” available at www.kazusa.ojp/codon/and these tables can be adapted in a number of ways. See Nakamura, Y., et al. “Codon usage tabulated from the international DNA sequence databases: status for the year 2000” Nucl. Acids Res. 28:292 (2000). Computer algorithms for codon optimizing a particular sequence for expression in a particular host cell are also available, such as Gene Forge (Aptagen; Jacobus, PA), are also available. In some embodiments, one or more codons (e.g., 1, 2, 3, 4, 5, 10, 15, 20, 25, 50, or more, or all codons) in a sequence encoding a DNA/RNA-targeting Cas protein corresponds to the most frequently used codon for a particular amino acid. As to codon usage in yeast, reference is made to the online Yeast Genome database available at http://www.yeastgenome.org/community/codon_usage.shtml, or Codon selection in yeast, Bennetzen and Hall, J Biol Chem. 1982 Mar. 25; 257(6):3026-31. As to codon usage in plants including algae, reference is made to Codon usage in higher plants, green algae, and cyanobacteria, Campbell and Gowri, Plant Physiol. 1990 January; 92(1):1-11.; as well as Codon usage in plant genes, Murray et al, Nucleic Acids Res. 1989 Jan. 25; 17(2):477-98; or Selection on the codon bias of chloroplast and cyanelle genes in diferent plant and algal lineages, Morton B R, J Mol Evol. 1998 April; 46(4):449-59.

[0350] The vector polynucleotide can be codon optimized for expression in a specific cell-type, tissue type, organ type, and/or subject type. In some embodiments, a codon optimized sequence is a sequence optimized for expression in a eukaryote, e.g., humans (i.e., being optimized for expression in a human or human cell), or for another eukaryote, such as another animal (e.g., a mammal or avian) as is described elsewhere herein. Such codon optimized sequences are within the ambit of the ordinary skilled artisan in view of the description herein. In some embodiments, the polynucleotide is codon optimized for a specific cell type. Such cell types can include, but are not limited to, CNS epithelial cells (including but not limited to the cells lining the brain ventricles), nerve cells (nerves, brain cells, spinal column cells, nerve support cells (e.g., astrocytes, glial cells, Schwann cells etc.), connective tissue cells of the CNS (fat and other soft tissue padding cells of the CNS such as the meninges), stem cells and other progenitor cells, CNS immune cells, germ cells, and combinations thereof. Such codon optimized sequences are within the ambit of the ordinary skilled artisan in view of the description herein. In some embodiments, the polynucleotide is codon optimized for a specific tissue type. Such tissue types can include, but are not limited to, CNS tissue and/or cells thereof. Such codon optimized sequences are within the ambit of the ordinary skilled artisan in view of the description herein. In some embodiments, the polynucleotide is codon optimized for a specific organ. Such organs include, but are not limited to, the brain. Such codon optimized sequences are within the ambit of the ordinary skilled artisan in view of the description herein.

[0351] In some embodiments, a vector polynucleotide is codon optimized for expression in particular cells, such as prokaryotic or eukaryotic cells. The eukaryotic cells may be those for derived from a particular organism, such as a plant or a mammal, including but not limited to human, or non-human eukaryote or animal or mammal as discussed herein, e.g., mouse, rat, rabbit, dog, livestock, or non-human mammal or primate.

Viral Vecto and/or Cargo Engineering for Reduced Immunogenicity and/or Toxicity

[0352] In some embodiments, the viral genome (such as an AAV genome) and/or cargo (e.g., cargo polynucleotide) is engineered to increase delivery and/or expression efficiency or to otherwise optimize delivery and/or expression efficiency so as to reduce immunogenicity and/or toxicity. See also e.g., Rapti and Grimm. of Front Immunol. 2021; 12: 753467, particularly at section 3.2.2.5 therein, and Domenger and Grimm. 2019. Human Molec Gen. 28(R1):R3-R14. It will be appreciated that one or more approaches discussed here and elsewhere herein can be combined.

[0353] In some embodiments, the engineered AAV is a self-complementary AAV (scAAV), which can have a favorable genome configuration with respect to efficiency.

[0354] In some embodiments, the engineered viral vector, such as an AAV viral vector, is engineered to have a cargo polynucleotide and/or genome that has a reduced number of CpG islands, which, without being bound by theory, can evade the adaptive and innate immune response by reducing TLR9 signaling. See also e.g., Faust et al., J Clin Invest (2013) 123:2994-3001 and Xiang et al., Mol Ther (2020) 28:771-83, the teachings of which can be adapted for use with the present invention.

[0355] In some embodiments, the engineered viral vector, such as an AAV viral vector, is engineered to include one or more short oligonucleotides in its genome that are configured to and/or capable of antagonizing TLR9 activation (referred to herein as TLR9i oligonucleotides), which, without being bound by theory can help the engineered viral particle evade TLR9 sensing and thus reduce immunogenicity. See e.g., Chan et al., Sci Transl Med. 2021 Feb. 10; 13(580), the teachings of which can be adapted for use with the present invention. In some embodiments, one or more TLR9i oligonucleotides (e.g., 1, 2, 3, 4, 5 or more) are incorporated into one or both of the inverted terminal repeats (ITRs) of a viral vector, such as an AAV viral vector. In some embodiments, the one or more TLR9i oligonucleotides are incorporated into the 5′ ITR. In some embodiments, the TLR9i oligonucleotides comprise 1 or more ODN repeats (e.g., 1, 2, 3, 4, 5 or more) that are optionally separated from each other via a linker polynucleotide. In some embodiments, the linker(s) is/are AAAAA. In some embodiments the ODN repeat comprises or consists of TAGGG. In some embodiments, the tTLR9i and/or ODN repeat comprises or consists of the sequence TAGGGTTAGGGTTAGGGTTAGGG (SEQ ID NO: 8582) or TTTAGGGTAGGGTAGGGTAGGG (SEQ ID NO: 8583). In some embodiments, the TLR9i oligonucleotides comprise or consist of the sequence TAGGGTAGGGTAGGGTAGGGAAAAATAGGGTAGGGTAGGGTAGG GAAAAATTAGGGTTAGGGTTAGGGTTAGGGAAAAA (SEQ ID NO: 8584). In some embodiments, the TLR9i oligonucleotides comprise or consist of the sequence TAGGGTAGGGTAGGGTAGGGAAAAATAGGGTAGGGTAGGGTAGG GAAAAATTTAGGGTTAGGGTTAGGGTTAGGGAAAAATGCAGCGGTAAGTTCCCA TCCAGGTTTTTTTGCAGCGGTAAGTTCCCATCCAGGTTTTTTGCAGCGGTAAGTTCC CATCCAGGTTTTT (SEQ ID NO: 8585). Other suitable TLR9i oligonucleotides are set forth in e.g., Chan et al., Sci Transl Med. 2021 Feb. 10; 13(580), particularly at Table S1, the teachings of which can be adapted for use with the present invention.

[0356] In some embodiments, the AAV vector is engineered to include a synthetic enhancer, promoter, or other cis acting regulatory element that is configured to optimize or otherwise control transcription of the genes they are associated with (e.g., including but not limited to a cargo polynucleotide). In some embodiments, the synthetic enhancer, promoter, or other cis acting regulatory element is positioned in the engineered AAV vector such that it is about 100 to about 1000 base pairs upstream of the gene or polynucleotide that it regulates (e.g., including but not limited to a cargo polynucleotide). In some embodiments, the synthetic enhancer, promoter, or other cis acting regulatory element contains one or more transcription factor binding sites, which are optionally engineered to bind specific transcription factors so as to control cargo expression temporally or spatially. For example, cell-specific transcription factors can be incorporated to spatially control expression. Exemplary spatial and temporal specific regulatory elements that can be incorporated are described in greater detail elsewhere herein. Additionally, promoter strength can be selected to further optimized polynucleotide expression of the AAV vector. Various promoters (strong and weak) are further described elsewhere herein and will be appreciated by one of ordinary skill in the art in view of the description herein. See also, e.g., Domenger and Grimm. 2019. Human Molec Gen. 28(R1):R3-R14, particularly at pages R4-R6, the teachings of which can be adapted for use with the present invention.. The specific combination of regulatory elements included can be used to fine tune and optimize cargo polynucleotide expression from a viral, e.g., AAV, vector or genome.

[0357] Other cis-acting elements, such as RNAi molecule binding sites or external stimuli responsive elements, can be incorporated into an engineered viral vector or viral vector genome, such as an AAV genome. By incorporating cell-type specific RNAi molecule binding sites, spatial expression of a cargo polynucleotide can be fine-tuned or optimized. Further, a synthetic or engineered RNAi molecule binding site can be included allowing control in a spatial and/or temporal manner by controlling where and/or when the synthetic or engineered RNAi molecule is present. In some embodiments, the polynucleotide encoding the synthetic RNAi molecule binding can also be incorporated into the viral vector genome such that it regulates a repressor or other regulatory element of the viral vector genome. In some embodiments, the RNAi molecule binding site(s) are incorporated into a viral vector genome within the 3′UTR of a cargo polynucleotide (e.g., a transgene) This is discussed in further detail elsewhere herein. In some embodiments, the viral vector, such as an AAV vector, is engineered to contain a LOV2 domain from Avena sativa that generates a blue light sensitive cargo polynucleotide. Thus, in this way blue light can be used to provide temporal and spatial control of transgene expression. See also e.g., Domenger and Grimm. 2019. Human Molec Gen. 28(R1):R3-R14, particularly at R7-R8 and FIG. 2, the teachings of which can be adapted for use with the present invention..

[0358] In some embodiments, the viral vector, e.g., AAV, is engineered to have one or more adverse structural elements deleted. Deleterious structural elements can be identified using a suitable screen strategy such as SMRT sequencing technology to identify vectors with adverse elements. In some embodiments, the adverse structural element is a shRNA, a hairpin sequence, or other secondary structure that mimics an ITR. See also e.g., Domenger and Grimm. 2019. Human Molec Gen. 28(R1):R3-R14, particularly at R9, the teachings of which can be adapted for use with the present invention.

[0359] Other exemplary modifications to reduce immunogenicity and/or toxicity are also described elsewhere herein.

Capsid Modifications for Improved Efficacy and/or Reduced Immunogenicity and/or Toxicity

[0360] In some embodiments, the polypeptide composition, such as a viral capsid or capsid polypeptide (e.g., AAV capsid or capsid polypeptide) of the present invention is engineered and/or rationally designed or evolved to contained one or more modifications (in addition to the n-mer motifs of the present invention) to modify and/or improve delivery, stability, efficacy, and/or reduce immunogenicity and/or toxicity of the protein composition, such as a viral capsid or capsid polypeptide (e.g., AAV capsid or capsid polypeptide) of the present invention. See e.g., Rapti and Grimm. of Front Immunol. 2021; 12: 753467, particularly at FIG. 2, Table 1 Section 3; Lam et al., J Pharm Sci, 86 (11)(1997), pp. 1250-1255, Le et al., J Control Release, 108 (1) (2005), pp. 161-177, Wonganan et al., Mol Pharm, 9 (7) (2011), pp. 78-92, Yao et al., Molecules, 22 (7) (2017), pp. 1-15, Zhao et al., J Virol, 90 (9) (2016), pp. 4262-4268, Gabriel et al. Hum Gene Ther Methods, 24 (2) (2013), pp. 80-93, Zhang et al., Biomaterials, 80 (2016), pp. 134-145, Mevel et al., Chem Sci, 11 (4) (2020), pp. 1122-1131, the teachings of which can be adapted for use with the present invention.

[0361] In some embodiments, the protein compositions, such as capsid protein(s) (e.g., AAV capsid polypeptides) of the present invention are PEGylated, which without being bound by theory, can mask the protein compositions, such as capsid protein(s) (e.g., AAV capsid polypeptides) of the present invention from antibodies. Suitable PEGylation of the protein compositions, such as capsid polypeptide(s) (e.g., AAV capsid polypeptides) of the present invention is described elsewhere herein.

[0362] In some embodiments, the protein compositions, such as capsid polypeptide(s) (e.g., AAV capsid polypeptides) of the present invention are engineered to reduce the number of oxidation susceptible residues, such as Met, Tyr, Trp, His, and/or Cys. In some embodiments, the protein compositions, such as capsid polypeptide(s) (e.g., AAV capsid polypeptides) of the present invention are engineered such that they contain one or more silent amino acid mutations (e.g., substitutions) that reduce the number of oxidation susceptible residues, such as Met, Tyr, Trp, His, and/or Cys. Without being bound by theory, such modifications can increase the stability, reduce degradation, increase half-life, and/or increase efficacy of the protein compositions, such as capsid polypeptide(s) (e.g., AAV capsid polypeptides) of the present invention.

[0363] In some embodiments, as is also further described herein, the protein compositions, such as capsid polypeptide(s) (e.g., AAV capsid polypeptides) of the present invention are encapsulated in a liposome, exosome, or other delivery vehicle. Without being bound by theory, such an approach can mask the protein compositions, such as capsid polypeptide(s) (e.g., AAV capsid polypeptides) of the present invention from immune components such as antibodies, thus reducing the immunogenicity of the composition.

[0364] In some embodiments, as is also further described herein, the protein compositions, such as capsid polypeptide(s) (e.g., AAV capsid polypeptides) of the present invention are cloaked via click labeling the polypeptide (e.g., capsid) to precisely tether oligonucleotides to the surface of the polypeptide composition (e.g., capsid) and associated or encapsulated with a lipid composition, (e.g., lipofectamine). See also e.g., Grimm et al., J Virol (2008) 82:5887-911. doi: 10.1128/JVI.00254-08, the teachings of which can be adapted for use with the present invention.

[0365] In some embodiments, the viral vector and/or polypeptide (e.g., capsid polypeptides) are selected, optimized and/or otherwise engineered to reduced immunogenicity. In some embodiments, and as discussed elsewhere herein, the serotype of the viral vector, such as AAV, can be selected to have a reduced immunogenicity in the recipient.

[0366] In some embodiments, the capsid polypeptide and/or capsid can be engineered and/or rationally designed or generated under a directed evolution approach to have reduced immunogenicity. In some embodiments, this is in addition or contemporaneous to any modification, engineering, selection, or directed evolution of proteins to have a specific tropism. See e.g., Rapti and Grimm. of Front Immunol. 2021; 12: 753467., particularly at Table 1 and Section 3/FIG. 2, the teachings of which can be adapted for use with the present invention.

[0367] As is also described herein, the immunogenicity of a viral capsid, particularly an AAV can be reduced, by one or more detargeting approaches, wherein the capsid or other component of the virial vector are modified to reduce delivery to or transgene/cargo expression in a non-target cell. In some embodiments, the capsid or capsid protein is modified at one or more residues to detarget a non-target cell, which can reduce the immunogenicity and/or toxicity of the viral particles. Exemplary modifications are described in greater detail elsewhere herein.

### Non-Viral Vectors and Carriers

[0368] In some embodiments, the vector is a non-viral vector or carrier. In some embodiments, non-viral vectors can have the advantage(s) of reduced toxicity and/or immunogenicity and/or increased bio-safety as compared to viral vectors The terms of art “Non-viral vectors and carriers” and as used herein in this context refers to molecules and/or compositions that are not based on one or more component of a virus or virus genome (excluding any nucleotide to be delivered and/or expressed by the non-viral vector) that can be capable of attaching to, incorporating, coupling, and/or otherwise interacting with an engineered targeting moiety, polypeptide, viral (e.g., AAV) capsid polynucleotide of the present invention and can be capable of ferrying the polynucleotide to a cell and/or expressing the polynucleotide. It will be appreciated that this does not exclude the inclusion of a virus-based polynucleotide that is to be delivered. For example, if a gRNA to be delivered is directed against a virus component and it is inserted or otherwise coupled to an otherwise non-viral vector or carrier, this would not make said vector a “viral vector”. Non-viral vectors and carriers include naked polynucleotides, chemical-based carriers, polynucleotide (non-viral) based vectors, and particle-based carriers. It will be appreciated that the term “vector” as used in the context of non-viral vectors and carriers refers to polynucleotide vectors and “carriers” used in this context refers to a non-nucleic acid or polynucleotide molecule or composition that be attached to or otherwise interact with a polynucleotide to be delivered, such as an engineered targeting moiety, polypeptide, viral (e.g., AAV) capsid polynucleotide of the present invention.

### Naked Polynucleotides

[0369] In some embodiments one or more engineered targeting moiety, polypeptide, viral (e.g., AAV) capsid polynucleotides described elsewhere herein can be included in a naked polynucleotide. The term of art “naked polynucleotide” as used herein refers to polynucleotides that are not associated with another molecule (e.g., proteins, lipids, and/or other molecules) that can often help protect it from environmental factors and/or degradation. As used herein, associated with includes, but is not limited to, linked to, adhered to, adsorbed to, enclosed in, enclosed in or within, mixed with, and the like. Naked polynucleotides that include one or more of the engineered targeting moiety, polypeptide, viral (e.g., AAV) capsid polynucleotides described herein can be delivered directly to a host cell and optionally expressed therein. The naked polynucleotides can have any suitable two- and three-dimensional configurations. By way of non-limiting examples, naked polynucleotides can be single-stranded molecules, double stranded molecules, circular molecules (e.g., plasmids and artificial chromosomes), molecules that contain portions that are single stranded and portions that are double stranded (e.g., ribozymes), and the like. In some embodiments, the naked polynucleotide contains only the engineered targeting moiety, polypeptide, viral (e.g., AAV) capsid polynucleotide(s) of the present invention. In some embodiments, the naked polynucleotide can contain other nucleic acids and/or polynucleotides in addition to the engineered targeting moiety, polypeptide, viral (e.g., AAV) capsid polynucleotide(s) of the present invention. The naked polynucleotides can include one or more elements of a transposon system. Transposons and system thereof are described in greater detail elsewhere herein.

### Non-Viral Polynucleotide Vectors

[0370] In some embodiments, one or more of the engineered targeting moiety, polypeptide, viral (e.g., AAV) capsid polynucleotides can be included in a non-viral polynucleotide vector. Suitable non-viral polynucleotide vectors include, but are not limited to, transposon vectors and vector systems, plasmids, bacterial artificial chromosomes, yeast artificial chromosomes, AR (antibiotic resistance)-free plasmids and miniplasmids, circular covalently closed vectors (e.g., minicircles, minivectors, miniknots,), linear covalently closed vectors (“dumbbell shaped”), MIDGE (minimalistic immunologically defined gene expression) vectors, MiLV (micro-linear vector) vectors, Ministrings, mini-intronic plasmids, PSK systems (post-segregationally killing systems), ORT (operator repressor titration) plasmids, and the like. See e.g., Hardee et al. 2017. Genes. 8(2):65.

[0371] In some embodiments, the non-viral polynucleotide vector can have a conditional origin of replication. In some embodiments, the non-viral polynucleotide vector can be an ORT plasmid. In some embodiments, the non-viral polynucleotide vector can have a minimalistic immunologically defined gene expression. In some embodiments, the non-viral polynucleotide vector can have one or more post-segregationally killing system genes. In some embodiments, the non-viral polynucleotide vector is AR-free. In some embodiments, the non-viral polynucleotide vector is a minivector. In some embodiments, the non-viral polynucleotide vector includes a nuclear localization signal. In some embodiments, the non-viral polynucleotide vector can include one or more CpG motifs. In some embodiments, the non-viral polynucleotide vectors can include one or more scaffold/matrix attachment regions (S/MARs). See e.g., Mirkovitch et al. 1984. Cell. 39:223-232, Wong et al. 2015. Adv. Genet. 89:113-152, whose techniques and vectors can be adapted for use in the present invention. S/MARs are AT-rich sequences that play a role in the spatial organization of chromosomes through DNA loop base attachment to the nuclear matrix. S/MARs are often found close to regulatory elements such as promoters, enhancers, and origins of DNA replication. Inclusion of one or S/MARs can facilitate a once-per-cell-cycle replication to maintain the non-viral polynucleotide vector as an episome in daughter cells. In embodiments, the S/MAR sequence is located downstream of an actively transcribed polynucleotide (e.g., one or more engineered AAV capsid polynucleotides of the present invention) included in the non-viral polynucleotide vector. In some embodiments, the S/MAR can be a S/MAR from the beta-interferon gene cluster. See e.g., Verghese et al. 2014. Nucleic Acid Res. 42:e53; Xu et al. 2016. Sci. China Life Sci. 59:1024-1033; Jin et al. 2016. 8:702-711; Koirala et al. 2014. Adv. Exp. Med. Biol. 801:703-709; and Nehlsen et al. 2006. Gene Ther. Mol. Biol. 10:233-244, whose techniques and vectors can be adapted for use in the present invention.

[0372] In some embodiments, the non-viral vector is a transposon vector or system thereof. As used herein, “transposon” (also referred to as transposable element) refers to a polynucleotide sequence that is capable of moving form location in a genome to another. There are several classes of transposons. Transposons include retrotransposons and DNA transposons. Retrotransposons require the transcription of the polynucleotide that is moved (or transposed) in order to transpose the polynucleotide to a new genome or polynucleotide. DNA transposons are those that do not require reverse transcription of the polynucleotide that is moved (or transposed) in order to transpose the polynucleotide to a new genome or polynucleotide. In some embodiments, the non-viral polynucleotide vector can be a retrotransposon vector. In some embodiments, the retrotransposon vector includes long terminal repeats. In some embodiments, the retrotransposon vector does not include long terminal repeats. In some embodiments, the non-viral polynucleotide vector can be a DNA transposon vector. DNA transposon vectors can include a polynucleotide sequence encoding a transposase. In some embodiments, the transposon vector is configured as a non-autonomous transposon vector, meaning that the transposition does not occur spontaneously on its own. In some of these embodiments, the transposon vector lacks one or more polynucleotide sequences encoding proteins required for transposition. In some embodiments, the non-autonomous transposon vectors lack one or more Ac elements.

[0373] In some embodiments a non-viral polynucleotide transposon vector system can include a first polynucleotide vector that contains the engineered targeting moiety, polypeptide, viral (e.g., AAV) capsid polynucleotide(s) of the present invention flanked on the 5′ and 3′ ends by transposon terminal inverted repeats (TIRs) and a second polynucleotide vector that includes a polynucleotide capable of encoding a transposase coupled to a promoter to drive expression of the transposase. When both are expressed in the same cell the transposase can be expressed from the second vector and can transpose the material between the TIRs on the first vector (e.g., the engineered targeting moiety, polypeptide, viral (e.g., AAV) capsid polynucleotide(s) of the present invention) and integrate it into one or more positions in the host cell's genome. In some embodiments the transposon vector or system thereof can be configured as a gene trap. In some embodiments, the TIRs can be configured to flank a strong splice acceptor site followed by a reporter and/or other gene (e.g., one or more of the engineered targeting moiety, polypeptide, viral (e.g., AAV) capsid polynucleotide(s) of the present invention) and a strong poly A tail. When transposition occurs while using this vector or system thereof, the transposon can insert into an intron of a gene and the inserted reporter or other gene can provoke a mis-splicing process and as a result it in activates the trapped gene.

[0374] Any suitable transposon system can be used. Suitable transposon and systems thereof can include, but are not limited to, Sleeping Beauty transposon system (Tc1/mariner superfamily) (see e.g., Ivics et al. 1997. Cell. 91(4): 501-510), piggyBac (piggyBac superfamily) (see e.g., Li et al. 2013 110(25): E2279-E2287 and Yusa et al. 2011. PNAS. 108(4): 1531-1536), Tol2 (superfamily hAT), Frog Prince (Tc1/mariner superfamily) (see e.g., Miskey et al. 2003 Nucleic Acid Res. 31(23):6873-6881) and variants thereof.

### Chemical Carriers

[0375] In some embodiments the engineered targeting moiety, polypeptide, viral (e.g., AAV) capsid polynucleotide(s) can be coupled to a chemical carrier. Chemical carriers that can be suitable for delivery of polynucleotides can be broadly classified into the following classes: (i) inorganic particles, (ii) lipid-based, (iii) polymer-based, and (iv) peptide based. They can be categorized as (1) those that can form condensed complexes with a polynucleotide (such as the engineered targeting moiety, polypeptide, viral (e.g. AAV) capsid polynucleotide(s) of the present invention), (2) those capable of targeting specific cells, (3) those capable of increasing delivery of the polynucleotide (such as the engineered targeting moiety, polypeptide, viral (e.g. AAV) capsid polynucleotide(s) of the present invention) to the nucleus or cytosol of a host cell, (4) those capable of disintegrating from DNA/RNA in the cytosol of a host cell, and (5) those capable of sustained or controlled release. It will be appreciated that any one given chemical carrier can include features from multiple categories. The term “particle” as used herein, refers to any suitable sized particles for delivery of the engineered targeting moiety, polypeptide, viral (e.g., AAV) capsid system components described herein. Suitable sizes include macro-, micro-, and nano-sized particles.

[0376] In some embodiments, the non-viral carrier can be an inorganic particle. In some embodiments, the inorganic particle, can be a nanoparticle. The inorganic particles can be configured and optimized by varying size, shape, and/or porosity. In some embodiments, the inorganic particles are optimized to escape from the reticuloendothelial system. In some embodiments, the inorganic particles can be optimized to protect an entrapped molecule from degradation. The Suitable inorganic particles that can be used as non-viral carriers in this context can include, but are not limited to, calcium phosphate, silica, metals (e.g., gold, platinum, silver, palladium, rhodium, osmium, iridium, ruthenium, mercury, copper, rhenium, titanium, niobium, tantalum, and combinations thereof), magnetic compounds, particles, and materials, (e.g., supermagnetic iron oxide and magnetite), quantum dots, fullerenes (e.g., carbon nanoparticles, nanotubes, nanostrings, and the like), and combinations thereof. Other suitable inorganic non-viral carriers are discussed elsewhere herein.

[0377] In some embodiments, the non-viral carrier can be lipid-based. Suitable lipid-based carriers are also described in greater detail herein. In some embodiments, the lipid-based carrier includes a cationic lipid or an amphiphilic lipid that is capable of binding or otherwise interacting with a negative charge on the polynucleotide to be delivered (e.g., such as an engineered targeting moiety, polypeptide, viral (e.g., AAV) capsid polynucleotide of the present invention). In some embodiments, chemical non-viral carrier systems can include a polynucleotide such as the engineered targeting moiety, polypeptide, viral (e.g., AAV) capsid polynucleotide(s) of the present invention) and a lipid (such as a cationic lipid). These are also referred to in the art as lipoplexes. Other embodiments of lipoplexes are described elsewhere herein. In some embodiments, the non-viral lipid-based carrier can be a lipid nano emulsion. Lipid nano emulsions can be formed by the dispersion of an immisicible liquid in another stabilized emulsifying agent and can have particles of about 200 nm that are composed of the lipid, water, and surfactant that can contain the polynucleotide to be delivered (e.g., the engineered targeting moiety, polypeptide, viral (e.g., AAV) capsid polynucleotide(s) of the present invention). In some embodiments, the lipid-based non-viral carrier can be a solid lipid particle or nanoparticle.

[0378] In some embodiments, the non-viral carrier can be peptide-based. In some embodiments, the peptide-based non-viral carrier can include one or more cationic amino acids. In some embodiments, 35 to 40, 45, 50, 55, 60, 65, 70, 75, 80, 85, 90, 95, 99 or 100% of the amino acids are cationic. In some embodiments, peptide carriers can be used in conjunction with other types of carriers (e.g., polymer-based carriers and lipid-based carriers to functionalize these carriers). In some embodiments, the functionalization is targeting a host cell. Suitable polymers that can be included in the polymer-based non-viral carrier can include, but are not limited to, polyethylenimine (PEI), chitosan, poly (DL-lactide) (PLA), poly (DL-Lactide-co-glycoside) (PLGA), dendrimers (see e.g., US Pat. Pub. 2017/0079916 whose techniques and compositions can be adapted for use with the engineered targeting moiety, polypeptide, viral (e.g., AAV) capsid polynucleotides of the present invention), polymethacrylate, and combinations thereof.

[0379] In some embodiments, the non-viral carrier can be configured to release an engineered delivery system polynucleotide that is associated with or attached to the non-viral carrier in response to an external stimulus, such as pH, temperature, osmolarity, concentration of a specific molecule or composition (e.g., calcium, NaCl, and the like), pressure and the like. In some embodiments, the non-viral carrier can be a particle that is configured includes one or more of the engineered AAV capsid polynucleotides describe herein and an environmental triggering agent response element, and optionally a triggering agent. In some embodiments, the particle can include a polymer that can be selected from the group of polymethacrylates and polyacrylates. In some embodiments, the non-viral particle can include one or more embodiments of the compositions microparticles described in US Pat. Pubs. 20150232883 and 20050123596, whose techniques and compositions can be adapted for use in the present invention.

[0380] In some embodiments, the non-viral carrier can be a polymer-based carrier. In some embodiments, the polymer is cationic or is predominantly cationic such that it can interact in a charge-dependent manner with the negatively charged polynucleotide to be delivered (such as the engineered targeting moiety, polypeptide, viral (e.g., AAV) capsid polynucleotide(s) of the present invention). Polymer-based systems are described in greater detail elsewhere herein.

### Viral Vectors

[0381] In some embodiments, the vector is a viral vector. The term of art “viral vector” and as used herein in this context refers to polynucleotide based vectors that contain one or more elements from or based upon one or more elements of a virus that can be capable of expressing and packaging a polynucleotide, such as an engineered targeting moiety, polypeptide, viral (e.g., AAV) capsid polynucleotide of the present invention, into a virus particle and producing said virus particle when used alone or with one or more other viral vectors (such as in a viral vector system). Viral vectors and systems thereof can be used for producing viral particles for delivery of and/or expression of one or more components of the engineered targeting moiety, polypeptide, viral (e.g., AAV) capsid system described herein. The viral vector can be part of a viral vector system involving multiple vectors. In some embodiments, systems incorporating multiple viral vectors can increase the safety of these systems. Suitable viral vectors can include adenoviral-based vectors, adeno associated vectors, helper-dependent adenoviral (HdAd) vectors, hybrid adenoviral vectors, and the like. Other embodiments of viral vectors and viral particles produce therefrom are described elsewhere herein. In some embodiments, the viral vectors are configured to produce replication incompetent viral particles for improved safety of these systems.

### Adenoviral Vectors, Helper-Dependent Adenoviral Vectors, and Hybrid Adenoviral Vectors

[0382] In some embodiments, the vector can be an adenoviral vector. In some embodiments, the adenoviral vector can include elements such that the virus particle produced using the vector or system thereof can be serotype 2, 5, or 9. In some embodiments, the polynucleotide to be delivered via the adenoviral particle can be up to about 8 kb. Thus, in some embodiments, an adenoviral vector can include a DNA polynucleotide to be delivered that can range in size from about 0.001 kb to about 8 kb. Adenoviral vectors have been used successfully in several contexts (see e.g., Teramato et al. 2000. Lancet. 355:1911-1912; Lai et al. 2002. DNA Cell. Biol. 21:895-913; Flotte et al., 1996. Hum. Gene. Ther. 7:1145-1159; and Kay et al. 2000. Nat. Genet. 24:257-261. The engineered AAV capsids can be included in an adenoviral vector to produce adenoviral particles containing said engineered AAV capsids.

[0383] In some embodiments the vector can be a helper-dependent adenoviral vector or system thereof. These are also referred to in the field as “gutless” or “gutted” vectors and are a modified generation of adenoviral vectors (see e.g., Thrasher et al. 2006. Nature. 443:E5-7). In embodiments of the helper-dependent adenoviral vector system one vector (the helper) can contain all the viral genes required for replication but contains a conditional gene defect in the packaging domain. The second vector of the system can contain only the ends of the viral genome, one or more engineered AAV capsid polynucleotides, and the native packaging recognition signal, which can allow selective packaged release from the cells (see e.g., Cideciyan et al. 2009. N Engl J Med. 361:725-727). Helper-dependent Adenoviral vector systems have been successful for gene delivery in several contexts (see e.g., Simonelli et al. 2010. J Am Soc Gene Ther. 18:643-650; Cideciyan et al. 2009. N Engl J Med. 361:725-727; Crane et al. 2012. Gene Ther. 19(4):443-452; Alba et al. 2005. Gene Ther. 12:18-S27; Croyle et al. 2005. Gene Ther. 12:579-587; Amalfitano et al. 1998. J. Virol. 72:926-933; and Morral et al. 1999. PNAS. 96:12816-12821). The techniques and vectors described in these publications can be adapted for inclusion and delivery of the engineered AAV capsid polynucleotides described herein. In some embodiments, the polynucleotide to be delivered via the viral particle produced from a helper-dependent adenoviral vector or system thereof can be up to about 38 kb. Thus, in some embodiments, an adenoviral vector can include a DNA polynucleotide to be delivered that can range in size from about 0.001 kb to about 37 kb (see e.g., Rosewell et al. 2011. J. Genet. Syndr. Gene Ther. Suppl. 5:001).

[0384] In some embodiments, the vector is a hybrid-adenoviral vector or system thereof. Hybrid adenoviral vectors are composed of the high transduction efficiency of a gene-deleted adenoviral vector and the long-term genome-integrating potential of adeno-associated, retroviruses, lentivirus, and transposon based-gene transfer. In some embodiments, such hybrid vector systems can result in stable transduction and limited integration site. See e.g., Balague et al. 2000. Blood. 95:820-828; Morral et al. 1998. Hum. Gene Ther. 9:2709-2716; Kubo and Mitani. 2003. J. Virol. 77(5): 2964-2971; Zhang et al. 2013. PloS One. 8(10) e76771; and Cooney et al. 2015. Mol. Ther. 23(4):667-674), whose techniques and vectors described therein can be modified and adapted for use in the engineered AAV capsid system of the present invention. In some embodiments, a hybrid-adenoviral vector can include one or more features of a retrovirus and/or an adeno-associated virus. In some embodiments the hybrid-adenoviral vector can include one or more features of a spuma retrovirus or foamy virus (FV). See e.g., Ehrhardt et al. 2007. Mol. Ther. 15:146-156 and Liu et al. 2007. Mol. Ther. 15:1834-1841, whose techniques and vectors described therein can be modified and adapted for use in the engineered AAV capsid system of the present invention. Advantages of using one or more features from the FVs in the hybrid-adenoviral vector or system thereof can include the ability of the viral particles produced therefrom to infect a broad range of cells, a large packaging capacity as compared to other retroviruses, and the ability to persist in quiescent (non-dividing) cells. See also e.g., Ehrhardt et al. 2007. Mol. Ther. 156:146-156 and Shuji et al. 2011. Mol. Ther. 19:76-82, whose techniques and vectors described therein can be modified and adapted for use in the engineered targeting moiety, polypeptide, viral (e.g., AAV) capsid system of the present invention.

### Adeno Associated Vectors

[0385] In an embodiment, the engineered vector or system thereof can be an adeno-associated vector (AAV). See, e.g., West et al., Virology 160:38-47 (1987); U.S. Pat. No. 4,797,368; WO 93/24641; Kotin, Human Gene Therapy 5:793-801 (1994); and Muzyczka, J. Clin. Invest. 94:1351 (1994). Although similar to adenoviral vectors in some of their features, AAVs have some deficiency in their replication and/or pathogenicity and thus can be safer that adenoviral vectors. In some embodiments the AAV can integrate into a specific site on chromosome 19 of a human cell with no observable side effects. In some embodiments, the capacity of the AAV vector, system thereof, and/or AAV particles can be up to about 4.7 kb. The AAV vector or system thereof can include one or more engineered capsid polynucleotides described herein.

[0386] The AAV vector or system thereof can include one or more regulatory molecules. In some embodiments the regulatory molecules can be promoters, enhancers, repressors and the like, which are described in greater detail elsewhere herein. In some embodiments, the AAV vector or system thereof can include one or more polynucleotides that can encode one or more regulatory proteins. In some embodiments, the one or more regulatory proteins can be selected from Rep78, Rep68, Rep52, Rep40, variants thereof, and combinations thereof. In some embodiments, the promoter can be a tissue specific promoter as previously discussed. In some embodiments, the tissue specific promoter can drive expression of an engineered capsid AAV capsid polynucleotide described herein.

[0387] The AAV vector or system thereof can include one or more polynucleotides that can encode one or more capsid polypeptides, such as the engineered AAV capsid polypeptides described elsewhere herein. The engineered capsid polypeptides can be capable of assembling into a protein shell (an engineered capsid) of the AAV virus particle. The engineered capsid can have a cell-, tissue- and/or organ-specific tropism.

[0388] In some embodiments, the AAV vector or system thereof can include one or more adenovirus helper factors or polynucleotides that can encode one or more adenovirus helper factors. Such adenovirus helper factors can include, but are not limited, E1A, E1B, E2A, E40RF6, and VA RNAs. In some embodiments, a producing host cell line expresses one or more of the adenovirus helper factors.

[0389] The AAV vector or system thereof can be configured to produce AAV particles having a specific serotype. In some embodiments, the serotype can be AAV1, AAV2, AAV3, AAV4, AAV5, AAV6, AAV7, AAV8, AAV rh.74, AAV rh.10, AAV12, AAV.DJ, AAV.ie, AAV1.9-3, AAV.Anc80, AAV.Anc80L65, AAV2.7m8, or AAV8BP2 or any combinations thereof. In some embodiments, the AAV can be AAV1, AAV-2, AAV-5, AAV-9 or any combination thereof. One can select the AAV of the AAV with regard to the cells to be targeted; e.g., one can select AAV serotypes 1, 2, 5, 9 or a hybrid capsid AAV-1, AAV-2, AAV-5, AAV-9 or any combination thereof for targeting brain and/or neuronal cells; and one can select AAV-4 for targeting cardiac tissue; and one can select AAV-8 for delivery to the liver. Thus, in some embodiments, an AAV vector or system thereof capable of producing AAV particles capable of targeting the brain and/or neuronal cells can be configured to generate AAV particles having serotypes 1, 2, 5 or a hybrid capsid AAV-1, AAV-2, AAV-5 or any combination thereof. In some embodiments, an AAV vector or system thereof capable of producing AAV particles capable of targeting cardiac tissue can be configured to generate an AAV particle having an AAV-4 serotype. In some embodiments, an AAV vector or system thereof capable of producing AAV particles capable of targeting the liver can be configured to generate an AAV having an AAV-8 serotype. See also Srivastava. 2017. Curr. Opin. Virol. 21:75-80.

[0390] It will be appreciated that while the different serotypes can provide some level of cell, tissue, and/or organ specificity, each serotype still is multi-tropic and thus can result in tissue-toxicity if using that serotype to target a tissue that the serotype is less efficient in transducing. Tus, in addition to achieving some tissue targeting capacity via selecting an AAV of a particular serotype, it will be appreciated that the tropism of the AAV serotype can be modified by an engineered AAV capsid described herein. As described elsewhere herein, variants of wild-type AAV of any serotype can be generated via a method described herein and determined to have a particular cell-specific tropism, which can be the same or different as that of the reference wild-type AAV serotype. In some embodiments, the cell, tissue, and/or specificity of the wild-type serotype can be enhanced (e.g., made more selective or specific for a particular cell type that the serotype is already biased towards). For example, wild-type AAV-9 is biased towards muscle and brain in humans (see e.g., Srivastava. 2017. Curr. Opin. Virol. 21:75-80.) By including an engineered AAV capsid and/or capsid polypeptide variant of wild-type AAV-9 as described herein, the bias for e.g., muscle (or other non-CNS tissue or cell) can be reduced or eliminated and/or the CNS tissue or cell specificity increased such that the muscle (or other non-CNS tissue or cell) specificity appears reduced in comparison, thus enhancing the specificity for the CNS tissue or cell as compared to the wild-type AAV-9. As previously mentioned, inclusion of an engineered capsid and/or capsid polypeptide n variant of a wild-type AAV serotype can have a different or more efficient and/or more specific tropism than the wild-type reference AAV serotype. For example, an engineered AAV capsid and/or capsid polypeptide variant of AAV-9 can have specificity for a tissue other than muscle or brain in humans or have heightened tropism for e.g., brain tissue as compared to wild-type AAV9.

[0391] In some embodiments, the AAV vector is a hybrid AAV vector or system thereof. Hybrid AAVs are AAVs that include genomes with elements from one serotype that are packaged into a capsid derived from at least one different serotype. For example, if it is the rAAV2/5 that is to be produced, and if the production method is based on the helper-free, transient transfection method discussed above, the 1st plasmid and the 3rd plasmid (the adeno helper plasmid) will be the same as discussed for rAAV2 production. However, the 2nd plasmid, the pRepCap will be different. In this plasmid, called pRep2/Cap5, the Rep gene is still derived from AAV2, while the Cap gene is derived from AAV5. The production scheme is the same as the above-mentioned approach for AAV2 production. The resulting rAAV is called rAAV2/5, in which the genome is based on recombinant AAV2, while the capsid is based on AAV5. It is assumed the cell or tissue-tropism displayed by this AAV2/5 hybrid virus should be the same as that of AAV5. It will be appreciated that wild-type hybrid AAV particles suffer the same specificity issues as with the non-hybrid wild-type serotypes previously discussed.

[0392] Advantages achieved by the wild-type based hybrid AAV systems can be combined with the increased and customizable cell-specificity that can be achieved with the engineered AAV capsids can be combined by generating a hybrid AAV that can include an engineered AAV capsid described elsewhere herein. It will be appreciated that hybrid AAVs can contain an engineered AAV capsid containing a genome with elements from a different serotype than the reference wild-type serotype that the engineered AAV capsid is a variant of. For example, a hybrid AAV can be produced that includes an engineered AAV capsid that is a variant of an AAV-9 serotype that is used to package a genome that contains components (e.g., rep elements) from an AAV-2 serotype. As with wild-type based hybrid AAVs previously discussed, the tropism of the resulting AAV particle will be that of the engineered AAV capsid.

[0393] A tabulation of certain wild-type AAV serotypes as to these cells can be found in Grimm, D. et al, J. Virol. 82: 5887-5911 (2008) reproduced below as Table 4. Further tropism details can be found in Srivastava. 2017. Curr. Opin. Virol. 21:75-80 as previously discussed.

TABLE 4

| Cell Line | AAV-1 | AAV-2 | AAV-3 | AAV-4 | AAV-5 | AAV-6 | AAV-8 | AAV-9 |
|---|---|---|---|---|---|---|---|---|
| Huh-7 | 13 | 100 | 2.5 | 0.0 | 0.1 | 10 | 0.7 | 0.0 |
| HEK293 | 25 | 100 | 2.5 | 0.1 | 0.1 | 5 | 0.7 | 0.1 |
| HeLa | 3 | 100 | 2.0 | 0.1 | 6.7 | 1 | 0.2 | 0.1 |
| HepG2 | 3 | 100 | 16.7 | 0.3 | 1.7 | 5 | 0.3 | ND |
| Hep1A | 20 | 100 | 0.2 | 1.0 | 0.1 | 1 | 0.2 | 0.0 |
| 911 | 17 | 100 | 11 | 0.2 | 0.1 | 17 | 0.1 | ND |
| CHO | 100 | 100 | 14 | 1.4 | 333 | 50 | 10 | 1.0 |
| COS | 33 | 100 | 33 | 3.3 | 5.0 | 14 | 2.0 | 0.5 |
| MeWo | 10 | 100 | 20 | 0.3 | 6.7 | 10 | 1.0 | 0.2 |
| NIH3T3 | 10 | 100 | 2.9 | 2.9 | 0.3 | 10 | 0.3 | ND |
| A549 | 14 | 100 | 20 | ND | 0.5 | 10 | 0.5 | 0.1 |
| HT1180 | 20 | 100 | 10 | 0.1 | 0.3 | 33 | 0.5 | 0.1 |
| Monocytes | 1111 | 100 | ND | ND | 125 | 1429 | ND | ND |
| Immature | 2500 | 100 | ND | ND | 222 | 2857 | ND | ND |
| DC | | | | | | | | |
| Mature DC | 2222 | 100 | ND | ND | 333 | 3333 | ND | ND |

[0394] In some embodiments, the AAV vector or system thereof is AAV rh.74 or AAV rh.10.

[0395] In some embodiments, the AAV vector or system thereof is configured as a “gutless” vector, similar to that described in connection with a retroviral vector. In some embodiments, the “gutless” AAV vector or system thereof can have the cis-acting viral DNA elements involved in genome amplification and packaging in linkage with the heterologous sequences of interest (e.g., the engineered AAV capsid polynucleotide(s)).

### Vector Construction

[0396] The vectors described herein can be constructed using any suitable process or technique. In some embodiments, one or more suitable recombination and/or cloning methods or techniques can be used to the vector(s) described herein. Suitable recombination and/or cloning techniques and/or methods can include, but not limited to, those described in U.S. Application publication No. US 2004-0171156 A1. Other suitable methods and techniques are described elsewhere herein.

[0397] Construction of recombinant AAV vectors is described in a number of publications, including U.S. Pat. No. 5,173,414; Tratschin et al., Mol. Cell. Biol. 5:3251-3260 (1985); Tratschin, et al., Mol. Cell. Biol. 4:2072-2081 (1984); Hermonat & Muzyczka, PNAS 81:6466-6470 (1984); and Samulski et al., J. Virol. 63:03822-3828 (1989). Any of the techniques and/or methods can be used and/or adapted for constructing an AAV or other vectors described herein. AAV vectors are discussed elsewhere herein.

[0398] In some embodiments, the vector can have one or more insertion sites, such as a restriction endonuclease recognition sequence (also referred to as a “cloning site”). In some embodiments, one or more insertion sites (e.g., about or more than about 1, 2, 3, 4, 5, 6, 7, 8, 9, 10, or more insertion sites) are located upstream and/or downstream of one or more sequence elements of one or more vectors.

[0399] Delivery vehicles, vectors, particles, nanoparticles, formulations and components thereof for expression of one or more elements of an engineered AAV capsid system described herein are as used in the foregoing documents, such as WO 2014/093622 (PCT/US2013/074667) and are discussed in greater detail herein.

Virus Particle Production from Viral Vectors

### AAV Particle Production

[0400] There are two main strategies for producing AAV particles from AAV vectors and systems thereof, such as those described herein, which depend on how the adenovirus helper factors are provided (helper v. helper free). In some embodiments, a method of producing AAV particles from AAV vectors and systems thereof can include adenovirus infection into cell lines that stably harbor AAV replication and capsid encoding polynucleotides along with AAV vector containing the polynucleotide to be packaged and delivered by the resulting AAV particle (e.g., the engineered AAV capsid polynucleotide(s)). In some embodiments, a method of producing AAV particles from AAV vectors and systems thereof can be a “helper free” method, which includes co-transfection of an appropriate producing cell line with three vectors (e.g., plasmid vectors): (1) an AAV vector that contains a polynucleotide of interest (e.g., the engineered AAV capsid polynucleotide(s)) between 2 ITRs; (2) a vector that carries the AAV Rep-Cap encoding polynucleotides; and (helper polynucleotides. One of skill in the art will appreciate various methods and variations thereof that are both helper and -helper free and as well as the different advantages of each system.

[0401] The engineered AAV vectors and systems thereof described herein can be produced by any of these methods.

### Vector and Virus Particle Delivery

[0402] A vector (including non-viral carriers) described herein can be introduced into host cells to thereby produce transcripts, proteins, or peptides, including fusion proteins or peptides encoded by nucleic acids as described herein (e.g., engineered AAV capsid system transcripts, proteins, enzymes, mutant forms thereof, fusion proteins thereof, etc.), and virus particles (such as from viral vectors and systems thereof).

[0403] One or more engineered AAV capsid polynucleotides can be delivered using adeno associated virus (AAV), adenovirus or other plasmid or viral vector types as previously described, in particular, using formulations and doses from, for example, U.S. Pat. No. 8,454,972 (formulations, doses for adenovirus), U.S. Pat. No. 8,404,658 (formulations, doses for AAV) and U.S. Pat. No. 5,846,946 (formulations, doses for DNA plasmids) and from clinical trials and publications regarding the clinical trials involving lentivirus, AAV and adenovirus. For examples, for AAV, the route of administration, formulation and dose can be as in U.S. Pat. No. 8,454,972 and as in clinical trials involving AAV. For Adenovirus, the route of administration, formulation and dose can be as in U.S. Pat. No. 8,404,658 and as in clinical trials involving adenovirus.

[0404] For plasmid delivery, the route of administration, formulation and dose can be as in U.S. Pat. No. 5,846,946 and as in clinical studies involving plasmids. In some embodiments, doses can be based on or extrapolated to an average 70 kg individual (e.g., a male adult human), and can be adjusted for patients, subjects, mammals of different weight and species. Frequency of administration is within the ambit of the medical or veterinary practitioner (e.g., physician, veterinarian), depending on usual factors including the age, sex, general health, other conditions of the patient or subject and the particular condition or symptoms being addressed. The viral vectors can be injected into or otherwise delivered to the tissue or cell of interest.

[0405] In terms of in vivo delivery, AAV is advantageous over other viral vectors for a couple of reasons such as low toxicity (this may be due to the purification method not requiring ultra-centrifugation of cell particles that can activate the immune response) and a low probability of causing insertional mutagenesis because it doesn't integrate into the host genome.

[0406] The vector(s) and virus particles described herein can be delivered into a host cell in vitro, in vivo, and or ex vivo. Delivery can occur by any suitable method including, but not limited to, physical methods, chemical methods, and biological methods. Physical delivery methods are those methods that employ physical force to counteract the membrane barrier of the cells to facilitate intracellular delivery of the vector. Suitable physical methods include, but are not limited to, needles (e.g., injections), ballistic polynucleotides (e.g., particle bombardment, micro projectile gene transfer, and gene gun), electroporation, sonoporation, photoporation, magnetofection, hydroporation, and mechanical massage. Chemical methods are those methods that employ a chemical to elicit a change in the cells membrane permeability or other characteristic(s) to facilitate entry of the vector into the cell. For example, the environmental pH can be altered which can elicit a change in the permeability of the cell membrane. Biological methods are those that rely and capitalize on the host cell's biological processes or biological characteristics to facilitate transport of the vector (with or without a carrier) into a cell. For example, the vector and/or its carrier can stimulate an endocytosis or similar process in the cell to facilitate uptake of the vector into the cell.

[0407] Delivery of engineered AAV capsid system components (e.g., polynucleotides encoding engineered AAV capsid and/or capsid polypeptides) to cells via particles. The term “particle” as used herein, refers to any suitable sized particles for delivery of the engineered AAV capsid system components described herein. Suitable sizes include macro-, micro-, and nano-sized particles. In some embodiments, any of the of the engineered AAV capsid system components (e.g., polypeptides, polynucleotides, vectors, and combinations thereof described herein) can be attached to, coupled to, integrated with, otherwise associated with one or more particles or component thereof as described herein. The particles described herein can then be administered to a cell or organism by an appropriate route and/or technique. In some embodiments, particle delivery can be selected and be advantageous for delivery of the polynucleotide or vector components. It will be appreciated that in embodiments, particle delivery can also be advantageous for other engineered capsid system molecules and formulations described elsewhere herein.

### Engineered Virus Particles Including an Engineered Viral Capsid

[0408] Also described herein are engineered virus particles (also referred to here and elsewhere herein as “engineered viral particles”) that can contain an engineered viral (e.g., AAV) capsid as described in detail elsewhere herein. Viral particles with an engineered AAV capsid are referred to herein as engineered AAV particles. It will be appreciated that the engineered viral (e.g., AAV) particles can be adenovirus-based particles, helper adenovirus-based particles, AAV-based particles, or hybrid adenovirus-based particles that contain at least one engineered AAV capsid polypeptides as previously described. An engineered AAV capsid is one that that contains one or more engineered AAV capsid polypeptides as are described elsewhere herein. In some embodiments, the engineered AAV particles can include 1-60 engineered AAV capsid polypeptides described herein. In some embodiments, the engineered AAV particles can contain 1, 2, 3, 4, 5, 6, 7, 8, 9, 10, 11, 12, 13, 14, 15, 16, 17, 18, 19, 20, 21, 22, 23, 24, 25, 26, 27, 28, 29, 30, 31, 32, 33, 34, 35, 36, 37, 38, 39, 40, 41, 42, 43, 44, 45, 46, 47, 48, 49, 50, 51, 52, 53, 54, 55, 56, 57, 58, 59, or 60 engineered capsid polypeptides. In some embodiments, the engineered AAV particles can contain 0-59 wild-type AAV capsid polypeptides. In some embodiments, the engineered AAV particles can contain 0, 1, 2, 3, 4, 5, 6, 7, 8, 9, 10, 11, 12, 13, 14, 15, 16, 17, 18, 19, 20, 21, 22, 23, 24, 25, 26, 27, 28, 29, 30, 31, 32, 33, 34, 35, 36, 37, 38, 39, 40, 41, 42, 43, 44, 45, 46, 47, 48, 49, 50, 51, 52, 53, 54, 55, 56, 57, 58, or 59 wild-type AAV capsid polypeptides. The engineered AAV particles can thus include one or more n-mer inserts as is previously described.

[0409] The engineered AAV particle can include one or more cargo polynucleotides. Cargo polynucleotides are discussed in greater detail elsewhere herein. Methods of making the engineered AAV particles from viral and non-viral vectors are described elsewhere herein. Formulations containing the engineered virus particles are described elsewhere herein.

[0410] The engineered viral (e.g., AAV) capsid polynucleotides, other viral (e.g., AAV) polynucleotide(s), and/or vector polynucleotides can contain one or more cargo polynucleotides. The cargo polynucleotides can encode one or more polypeptides. Exemplary cargos are described in greater detail elsewhere herein. It will be appreciated that when a cargo polypeptide is described that its encoding polynucleotide can be a cargo polynucleotide described in this context. In some embodiments, the one or more cargo polynucleotides can be operably linked to the engineered viral (e.g., AAV) capsid polynucleotide(s) and can be part of the engineered viral (e.g., AAV) genome of the viral (e.g., AAV) system of the present invention. The cargo polynucleotides can be packaged into an engineered viral (e.g., AAV) particle, which can be delivered to, e.g., a cell. In some embodiments, the cargo polynucleotide can be capable of modifying a polynucleotide (e.g., gene or transcript) of a cell to which it is delivered. As used herein, “gene” can refer to a hereditary unit corresponding to a sequence of DNA that occupies a specific location on a chromosome and that contains the genetic instruction for a characteristic(s) or trait(s) in an organism. The term gene can refer to translated and/or untranslated regions of a genome. “Gene” can refer to the specific sequence of DNA that is transcribed into an RNA transcript that can be translated into a polypeptide or be a catalytic RNA molecule, including but not limited to, tRNA, siRNA, piRNA, miRNA, long-non-coding RNA and shRNA. Polynucleotide, gene, transcript, etc. modification includes all genetic engineering techniques including, but not limited to, gene editing as well as conventional recombinational gene modification techniques (e.g., whole or partial gene insertion, deletion, and mutagenesis (e.g., insertional and deletional mutagenesis) techniques.

### Engineered Cells and Organisms Expressing Said Engineered Viral Capsids

[0411] Described herein are engineered cells that can include one or more of the engineered targeting moieties, polypeptides, viral (e.g., AAV) capsid polynucleotides, polypeptides, vectors, and/or vector systems described in greater detail elsewhere herein. In some embodiments, one or more of the engineered viral (e.g., AAV) capsid polynucleotides can be expressed in the engineered cells. In some embodiments, the engineered cells can be capable of producing engineered viral (e.g., AAV) capsid polypeptides and/or engineered viral (e.g., AAV) capsid particles that are described elsewhere herein. Also described herein are modified or engineered organisms that can include one or more engineered cells described herein. The engineered cells can be engineered to express a cargo molecule (e.g., a cargo polynucleotide) dependently or independently of an engineered viral (e.g., AAV) capsid polynucleotide as described elsewhere herein.

[0412] A wide variety of animals, plants, algae, fungi, yeast, etc. and animal, plant, algae, fungus, yeast cell or tissue systems may be engineered to express one or more nucleic acid constructs of the engineered targeting moiety, polypeptide, vector, viral (e.g., AAV) capsid system described herein using various transformation methods mentioned elsewhere herein. This can produce organisms that can produce engineered targeting moiety, polypeptide, vector, viral (e.g., AAV) capsid particles, such as for production purposes, engineered targeting moiety, polypeptide, vector, viral (e.g., AAV) capsid design and/or generation, and/or model organisms. In some embodiments, the polynucleotide(s) encoding one or more components of the engineered targeting moiety, polypeptide, vector, viral (e.g., AAV) capsid system described herein can be stably or transiently incorporated into one or more cells of a plant, animal, algae, fungus, and/or yeast or tissue system. In some embodiments, one or more of engineered targeting moiety, polypeptide, vector, viral (e.g., AAV) capsid system polynucleotides are genomically incorporated into one or more cells of a plant, animal, algae, fungus, and/or yeast or tissue system. Further embodiments of the modified organisms and systems are described elsewhere herein. In some embodiments, one or more components of the engineered targeting moiety, polypeptide, vector, viral (e.g., AAV) capsid system described herein are expressed in one or more cells of the plant, animal, algae, fungus, yeast, or tissue systems.

### Engineered Cells

[0413] Described herein are various embodiments of engineered cells that can include one or more of the engineered targeting moiety, polypeptide, vector, viral (e.g., AAV) capsid system polynucleotides, polypeptides, vectors, and/or vector systems described elsewhere herein. In some embodiments, the cells can express one or more of the engineered targeting moiety, polypeptide, vector, viral (e.g., AAV) capsid polynucleotides and can produce one or more engineered targeting moiety, polypeptide, vector, viral (e.g., AAV) capsid particles, which are described in greater detail herein. Such cells are also referred to herein as “producer cells”. It will be appreciated that these engineered cells are different from “modified cells” described elsewhere herein in that the modified cells are not necessarily producer cells (i.e. they do not make engineered viral (e.g., AAV) particles) unless they include one or more of the engineered targeting moiety, polypeptide, viral (e.g., AAV) capsid polynucleotides, engineered targeting moiety, polypeptide, viral (e.g., AAV) capsid vectors or other vectors described herein that render the cells capable of producing an engineered viral (e.g., AAV) capsid particle or other particles described herein. Modified cells can be recipient cells of an engineered viral (e.g., AAV) capsid particles and can, in some embodiments, be modified by the engineered viral (e.g., AAV) capsid particle(s) and/or a cargo polynucleotide delivered to the recipient cell. Modified cells are discussed in greater detail elsewhere herein. The term modification can be used in connection with modification of a cell that is not dependent on being a recipient cell. For example, isolated cells can be modified prior to receiving an engineered targeting moiety, polypeptide, viral (e.g., AAV) capsid molecule.

[0414] In an embodiment, the invention provides a non-human eukaryotic organism; for example, a multicellular eukaryotic organism, including a eukaryotic host cell containing one or more components of an engineered delivery system described herein according to any of the described embodiments. In other embodiments, the invention provides a eukaryotic organism; preferably a multicellular eukaryotic organism, comprising a eukaryotic host cell containing one or more components of an engineered delivery system described herein according to any of the described embodiments. In some embodiments, the organism is a host of a virus (e.g., an AAV).

[0415] In particular embodiments, the plants, algae, fungi, yeast, etc., cells or parts obtained are transgenic plants, comprising an exogenous DNA sequence incorporated into the genome of all or part of the cells.

[0416] The engineered cell can be a prokaryotic cell. The prokaryotic cell can be bacterial cell. The prokaryotic cell can be an archaea cell. The bacterial cell can be any suitable bacterial cell. Suitable bacterial cells can be from the genus Escherichia, Bacillus, Lactobacillus, Rhodococcus, Rodhobacter, Synechococcus, Synechoystis, Pseudomonas, Psedoaltermonas, Stenotrophamonas, and Streptomyces Suitable bacterial cells include, but are not limited to Escherichia coli cells, Caulobacter crescentus cells, Rodhobacter sphaeroides cells, Psedoaltermonas haloplanktis cells. Suitable strains of bacterial include, but are not limited to BL21(DE3), DL21(DE3)-pLysS, BL21 Star-pLysS, BL21-SI, BL21-AI, Tuner, Tuner pLysS, Origami, Origami B pLysS, Rosetta, Rosetta pLysS, Rosetta-gami-pLysS, BL21 CodonPlus, AD494, BL2trxB, HMS174, NovaBlue (DE3), BLR, C41(DE3), C43(DE3), Lemo21 (DE3), Shuffle T7, ArcticExpress and ArticExpress (DE3).

[0417] The engineered cell can be a eukaryotic cell. The eukaryotic cells may be those of or derived from a particular organism, such as a plant or a mammal, including but not limited to human, or non-human eukaryote or animal or mammal as herein discussed, e.g., mouse, rat, rabbit, dog, livestock, or non-human mammal or primate. In some embodiments the engineered cell can be a cell line. Examples of cell lines include, but are not limited to, C8161, CCRF-CEM, MOLT, mIMCD-3, NHDF, HeLa-S3, Huh1, Huh4, Huh7, HUVEC, HASMC, HEKn, HEKa, MiaPaCell, Panc1, PC-3, TF1, CTLL-2, CiR, Rat6, CV1, RPTE, A10, T24, J82, A375, ARH-77, Calu1, SW480, SW620, SKOV3, SK-UT, CaCo2, P388D1, SEM-K2, WEHI-231, HB56, TIB55, Jurkat, J45.01, LRMB, Bcl-1, BC-3, IC21, DLD2, Raw264.7, NRK, NRK-52E, MRC5, MEF, Hep G2, HeLa B, HeLa T4, COS, COS-1, COS-6, COS-M6A, BS-C-1 monkey kidney epithelial, BALB/3T3 mouse embryo fibroblast, 3T3 Swiss, 3T3-L1, 132-d5 human fetal fibroblasts; 10.1 mouse fibroblasts, 293-T, 3T3, 721, 9L, A2780, A2780ADR, A2780cis, A172, A20, A253, A431, A-549, ALC, B16, B35, BCP-1 cells, BEAS-2B, bEnd.3, BHK-21, BR 293, BxPC3, C3H-10T1/2, C6/36, Cal-27, CHO, CHO-7, CHO-IR, CHO-K1, CHO-K2, CHO-T, CHO Dhfr −/−, COR-L23, COR-L23/CPR, COR-L23/5010, COR-L23/R23, COS-7, COV-434, CML T1, CMT, CT26, D17, DH82, DU145, DuCaP, EL4, EM2, EM3, EMT6/AR1, EMT6/AR10.0, FM3, H1299, H69, HB54, HB55, HCA2, HEK-293, HeLa, Hepa1c1c7, HL-60, HMEC, HT-29, Jurkat, JY cells, K562 cells, Ku812, KCL22, KG1, KYO1, LNCap, Ma-Mel 1-48, MC-38, MCF-7, MCF-10A, MDA-MB-231, MDA-MB-468, MDA-MB-435, MDCK II, MDCK II, MOR/0.2R, MONO-MAC 6, MTD-1A, MyEnd, NCI-H69/CPR, NCI-H69/LX10, NCI-H69/LX20, NCI-H69/LX4, NIH-3T3, NALM-1, NW-145, OPCN/OPCT cell lines, Peer, PNT-1A/PNT 2, RenCa, RIN-5F, RMA/RMAS, Saos-2 cells, Sf-9, SkBr3, T2, T-47D, T84, THP1 cell line, U373, U87, U937, VCaP, Vero cells, WM39, WT-49, X₆₃, YAC-1, YAR, and transgenic varieties thereof. Cell lines are available from a variety of sources known to those with skill in the art (see, e.g., the American Type Culture Collection (ATCC) (Manassas, Va.)).

[0418] In some embodiments, the engineered producer cell is a CNS cell, such as a neuron or supporting cell (e.g., a Schawan cell, astrocyte, glial cells, microglial cell and/or the like), a muscle cell (e.g., cardiac muscle, skeletal muscle, and/or smooth muscle), bone cell, blood cell, immune cell (including but not limited to B cells, macrophages, T-cells, CAR-T cells, and the like), kidney cells, bladder cells, lung cells, heart cells, liver cells, brain cells, neurons, skin cells, stomach cells, neuronal support cells, intestinal cells, epithelial cells, endothelial cells, stem or other progenitor cells, adrenal gland cells, cartilage cells, and combinations thereof.

[0419] In some embodiments, the engineered cell can be a fungus cell. As used herein, a “fungal cell” refers to any type of eukaryotic cell within the kingdom of fungi. Phyla within the kingdom of fungi include Ascomycota, Basidiomycota, Blastocladiomycota, Chytridiomycota, Glomeromycota, Microsporidia, and Neocallimastigomycota. Fungal cells may include yeasts, molds, and filamentous fungi. In some embodiments, the fungal cell is a yeast cell.

[0420] As used herein, the term “yeast cell” refers to any fungal cell within the phyla Ascomycota and Basidiomycota. Yeast cells may include budding yeast cells, fission yeast cells, and mold cells. Without being limited to these organisms, many types of yeast used in laboratory and industrial settings are part of the phylum Ascomycota. In some embodiments, the yeast cell is an S. cerevisiae, Kluyveromyces marxianus, or Issatchenkia orientalis cell. Other yeast cells may include without limitation Candida spp. (e.g., Candida albicans), Yarrowia spp. (e.g., Yarrowia lipolytica), Pichia spp. (e.g., Pichia pastoris), Kluyveromyces spp. (e.g., Kluyveromyces lactis and Kluyveromyces marxianus), Neurospora spp. (e.g., Neurospora crassa), Fusarium spp. (e.g., Fusarium oxysporum), and Issatchenkia spp. (e.g., Issatchenkia orientalis, a.k.a. Pichia kudriavzevii and Candida acidothermophilum). In some embodiments, the fungal cell is a filamentous fungal cell. As used herein, the term “filamentous fungal cell” refers to any type of fungal cell that grows in filaments, i.e., hyphae or mycelia. Examples of filamentous fungal cells may include without limitation Aspergillus spp. (e.g., Aspergillus niger), Trichoderma spp. (e.g., Trichoderma reesei), Rhizopus spp. (e.g., Rhizopus oryzae), and Mortierella spp. (e.g., Mortierella isabellina).

[0421] In some embodiments, the fungal cell is an industrial strain. As used herein, “industrial strain” refers to any strain of fungal cell used in or isolated from an industrial process, e.g., production of a product on a commercial or industrial scale. Industrial strain may refer to a fungal species that is typically used in an industrial process, or it may refer to an isolate of a fungal species that may be also used for non-industrial purposes (e.g., laboratory research). Examples of industrial processes may include fermentation (e.g., in production of food or beverage products), distillation, biofuel production, production of a compound, and production of a polypeptide. Examples of industrial strains can include, without limitation, JAY270 and ATCC4124.

[0422] In some embodiments, the fungal cell is a polyploid cell. As used herein, a “polyploid” cell may refer to any cell whose genome is present in more than one copy. A polyploid cell may refer to a type of cell that is naturally found in a polyploid state, or it may refer to a cell that has been induced to exist in a polyploid state (e.g., through specific regulation, alteration, inactivation, activation, or modification of meiosis, cytokinesis, or DNA replication). A polyploid cell may refer to a cell whose entire genome is polyploid, or it may refer to a cell that is polyploid in a particular genomic locus of interest.

[0423] In some embodiments, the fungal cell is a diploid cell. As used herein, a “diploid” cell may refer to any cell whose genome is present in two copies. A diploid cell may refer to a type of cell that is naturally found in a diploid state, or it may refer to a cell that has been induced to exist in a diploid state (e.g., through specific regulation, alteration, inactivation, activation, or modification of meiosis, cytokinesis, or DNA replication). For example, the S. cerevisiae strain S228C may be maintained in a haploid or diploid state. A diploid cell may refer to a cell whose entire genome is diploid, or it may refer to a cell that is diploid in a particular genomic locus of interest. In some embodiments, the fungal cell is a haploid cell. As used herein, a “haploid” cell may refer to any cell whose genome is present in one copy. A haploid cell may refer to a type of cell that is naturally found in a haploid state, or it may refer to a cell that has been induced to exist in a haploid state (e.g., through specific regulation, alteration, inactivation, activation, or modification of meiosis, cytokinesis, or DNA replication). For example, the S. cerevisiae strain S228C may be maintained in a haploid or diploid state. A haploid cell may refer to a cell whose entire genome is haploid, or it may refer to a cell that is haploid in a particular genomic locus of interest.

[0424] In some embodiments, the engineered cell is a cell obtained from a subject. In some embodiments, the subject is a healthy or non-diseased subject. In some embodiments, the subject is a subject with a desired physiological and/or biological characteristic such that when an engineered targeting moiety, polypeptide, vector, viral (e.g., AAV) capsid particle is produced it can package one or more cargo polynucleotides that can be related to the desired physiological and/or biological characteristic and/or capable of modifying the desired physiological and/or biological characteristic. Thus, the cargo polynucleotides of the produced engineered viral (e.g., AAV) or other particles can be capable of transferring the desired characteristic to a recipient cell. In some embodiments, the cargo polynucleotides are capable of modifying a polynucleotide of the engineered cell such that the engineered cell has a desired physiological and/or biological characteristic.

[0425] In some embodiments, a cell transfected with one or more vectors described herein is used to establish a new cell line comprising one or more vector-derived sequences.

[0426] The engineered cells can be used to produce engineered targeting moieties, polypeptides, viral (e.g., AAV) capsid polynucleotides, vectors, and/or particles. In some embodiments, the engineered targeting moieties, polypeptides, viral (e.g., AAV) capsid polynucleotides, vectors, and/or particles are produced, harvested, and/or delivered to a subject in need thereof. In some embodiments, the engineered cells are delivered to a subject. Other uses for the engineered cells are described elsewhere herein. In some embodiments, the engineered cells can be included in formulations and/or kits described elsewhere herein.

[0427] The engineered cells can be stored short-term or long-term for use at a later time. Suitable storage methods are generally known in the art. Further, methods of restoring the stored cells for use (such as thawing, reconstitution, and otherwise stimulating metabolism in the engineered cell after storage) at a later time are also generally known in the art.

### Formulations

[0428] Component(s) of the engineered targeting moieties, polypeptides, viral (e.g., AAV) capsid system, engineered cells, engineered viral (e.g., AAV) particles, and/or combinations thereof can be included in a formulation that can be delivered to a subject or a cell. In some embodiments, the formulation is a pharmaceutical formulation. One or more of the polypeptides, polynucleotides, vectors, cells, and combinations thereof described herein can be provided to a subject in need thereof or a cell alone or as an active ingredient, such as in a pharmaceutical formulation. As such, also described herein are pharmaceutical formulations containing an amount of one or more of the polypeptides, polynucleotides, vectors, cells, or combinations thereof described herein. In some embodiments, the pharmaceutical formulation can contain an effective amount of the one or more of the polypeptides, polynucleotides, vectors, cells, and combinations thereof described herein. The pharmaceutical formulations described herein can be administered to a subject in need thereof or a cell.

[0429] In some embodiments, the amount of the one or more of the polypeptides, polynucleotides, vectors, cells, virus particles, nanoparticles, other delivery particles, and combinations thereof described herein contained in the pharmaceutical formulation can range from about 1 μg/kg to about 10 mg/kg based upon the bodyweight of the subject in need thereof or average bodyweight of the specific patient population to which the pharmaceutical formulation can be administered. The amount of the one or more of the polypeptides, polynucleotides, vectors, cells, and combinations thereof described herein in the pharmaceutical formulation can range from about 1 μg to about 10 g, from about 10 nL to about 10 ml. In embodiments where the pharmaceutical formulation contains one or more cells, the amount can range from about 1 cell to 1×10², 1×10³, 1×10⁴, 1×10⁵, 1×10⁶, 1×10⁷, 1×10⁸, 1×10⁹, 1×10¹⁰ or more cells. In embodiments where the pharmaceutical formulation contains one or more cells, the amount can range from about 1 cell to 1×10², 1×10³, 1×10⁴, 1×10⁵, 1×10⁶, 1×10⁷, 1×10⁸, 1×10⁹, 1×10¹⁰ or more cells per nL, μL, mL, or L.

[0430] In embodiments, were engineered AAV capsid particles are included in the formulation, the formulation can contain 1 to 1×10¹, 1×10², 1×10³, 1×10⁴, 1×10⁵, 1×10⁶, 1×10⁷, 1×10⁸, 1×10⁹, 1×10¹⁰, 1×10¹¹, 1×10¹², 1×10¹³, 1×10¹⁴, 1×10¹⁵, 1×10¹⁶, 1×10¹⁷, 1×10¹⁸, 1×10¹⁹, or 1×10²⁰, transducing units (TU)/mL of the engineered AAV capsid particles. In some embodiments, the formulation can be 0.1 to 100 mL in volume and can contain 1 to 1×10¹, 1×10², 1×10³, 1×10⁴, 1×10⁵, 1×10⁶, 1×10⁷, 1×10⁸, 1×10⁹, 1×10¹⁰, 1×10¹¹, 1×10¹², 1×10¹³, 1×10¹⁴, 1×10¹⁵, 1×10¹⁶, 1×10¹⁷, 1×10¹⁸, 1×10¹⁹, or 1×10²⁰, transducing units (TU)/mL of the engineered AAV capsid particles.

### Pharmaceutically Acceptable Carriers and Auxiliary Ingredients and Agents

[0431] In embodiments, the pharmaceutical formulation containing an amount of one or more of the polypeptides, polynucleotides, vectors, cells, virus particles, nanoparticles, other delivery particles, and combinations thereof described herein can further include a pharmaceutically acceptable carrier. Suitable pharmaceutically acceptable carriers include, but are not limited to, water, salt solutions, alcohols, gum arabic, vegetable oils, benzyl alcohols, polyethylene glycols, gelatin, carbohydrates such as lactose, amylose or starch, magnesium stearate, talc, silicic acid, viscous paraffin, perfume oil, fatty acid esters, hydroxy methylcellulose, and polyvinyl pyrrolidone, which do not deleteriously react with the active composition.

[0432] The pharmaceutical formulations can be sterilized, and if desired, mixed with auxiliary agents, such as lubricants, preservatives, stabilizers, wetting agents, emulsifiers, salts for influencing osmotic pressure, buffers, coloring, flavoring and/or aromatic substances, and the like which do not deleteriously react with the active composition.

[0433] In addition to an amount of one or more of the polypeptides, polynucleotides, vectors, cells, engineered viral (e.g., AAV) capsids, viral (e.g., AAV) or other particles, nanoparticles, other delivery particles, and combinations thereof described herein, the pharmaceutical formulation can also include an effective amount of an auxiliary active agent, including but not limited to, polynucleotides, amino acids, peptides, polypeptides, antibodies, aptamers, ribozymes, hormones, immunomodulators, antipyretics, anxiolytics, antipsychotics, analgesics, antispasmodics, anti-inflammatories, anti-histamines, anti-infectives, chemotherapeutics, and combinations thereof.

[0434] In embodiments where there is an auxiliary active agent contained in the pharmaceutical formulation in addition to the one or more of the polypeptides, polynucleotides, compositions, vectors, cells, virus particles, nanoparticles, other delivery particles, and combinations thereof described herein, amount, such as an effective amount, of the auxiliary active agent will vary depending on the auxiliary active agent. In some embodiments, the amount of the auxiliary active agent ranges from 0.001 micrograms to about 1 milligram. In other embodiments, the amount of the auxiliary active agent ranges from about 0.01 IU to about 1000 IU. In further embodiments, the amount of the auxiliary active agent ranges from 0.001 mL to about 1 mL. In yet other embodiments, the amount of the auxiliary active agent ranges from about 1% w/w to about 50% w/w of the total pharmaceutical formulation. In additional embodiments, the amount of the auxiliary active agent ranges from about 1% v/v to about 50% v/v of the total pharmaceutical formulation. In still other embodiments, the amount of the auxiliary active agent ranges from about 1% w/v to about 50% w/v of the total pharmaceutical formulation.

### Dosage Forms

[0435] In some embodiments, the pharmaceutical formulations described herein may be in a dosage form. The dosage forms can be adapted for administration by any appropriate route. Appropriate routes include, but are not limited to, oral (including buccal or sublingual), rectal, epidural, intracranial, intraocular, inhaled, intranasal, topical (including buccal, sublingual, or transdermal), vaginal, intraurethral, parenteral, intracranial, subcutaneous, intramuscular, intravenous, intraperitoneal, intradermal, intraosseous, intracardiac, intraarticular, intracavemous, intrathecal, intravitreal, intracerebral, gingival, subgingival, intracerebroventricular, intra-arterial, intracarotid, intrathecal, intracisternal, subpial, intracerebroventricular, intraparenchymal, intracranial, subdural, subretinal, subconjunctival, intravitreal, intratympanic, intracochlear, intranasal, and intradermal. Such formulations may be prepared by any method known in the art.

[0436] Dosage forms adapted for oral administration can be discrete dosage units such as capsules, pellets or tablets, powders or granules, solutions, or suspensions in aqueous or non-aqueous liquids; edible foams or whips, or in oil-in-water liquid emulsions or water-in-oil liquid emulsions. In some embodiments, the pharmaceutical formulations adapted for oral administration also include one or more agents which flavor, preserve, color, or help disperse the pharmaceutical formulation. Dosage forms prepared for oral administration can also be in the form of a liquid solution that can be delivered as foam, spray, or liquid solution. In some embodiments, the oral dosage form can contain about 1 ng to 1000 g of a pharmaceutical formulation containing a therapeutically effective amount or an appropriate fraction thereof of the targeted effector fusion protein and/or complex thereof or composition containing the one or more of the polypeptides, polynucleotides, vectors, cells, and combinations thereof described herein. The oral dosage form can be administered to a subject in need thereof.

[0437] Where appropriate, the dosage forms described herein can be microencapsulated.

[0438] The dosage form can also be prepared to prolong or sustain the release of any ingredient. In some embodiments, the one or more of the polypeptides, polynucleotides, vectors, cells, and combinations thereof described herein can be the ingredient whose release is delayed. In other embodiments, the release of an optionally included auxiliary ingredient is delayed. Suitable methods for delaying the release of an ingredient include, but are not limited to, coating or embedding the ingredients in material in polymers, wax, gels, and the like. Delayed release dosage formulations can be prepared as described in standard references such as “Pharmaceutical dosage form tablets,” eds. Liberman et. al. (New York, Marcel Dekker, Inc., 1989), “Remington—The science and practice of pharmacy”, 20th ed., Lippincott Williams & Wilkins, Baltimore, MD, 2000, and “Pharmaceutical dosage forms and drug delivery systems”, 6th Edition, Ansel et al., (Media, PA: Williams and Wilkins, 1995). These references provide information on excipients, materials, equipment, and processes for preparing tablets and capsules and delayed release dosage forms of tablets and pellets, capsules, and granules. The delayed release can be anywhere from about an hour to about 3 months or more.

[0439] Examples of suitable coating materials include, but are not limited to, cellulose polymers such as cellulose acetate phthalate, hydroxypropyl cellulose, hydroxypropyl methylcellulose, hydroxypropyl methylcellulose phthalate, and hydroxypropyl methylcellulose acetate succinate; polyvinyl acetate phthalate, acrylic acid polymers and copolymers, and methacrylic resins that are commercially available under the trade name EUDRAGIT® (Roth Pharma, Westerstadt, Germany), zein, shellac, and polysaccharides.

[0440] Coatings may be formed with a different ratio of water-soluble polymer, water insoluble polymers, and/or pH dependent polymers, with or without water insoluble/water soluble non-polymeric excipient, to produce the desired release profile. The coating is either performed on the dosage form (matrix or simple) which includes, but is not limited to, tablets (compressed with or without coated beads), capsules (with or without coated beads), beads, particle compositions, “ingredient as is” formulated as, but not limited to, suspension form or as a sprinkle dosage form.

[0441] Dosage forms adapted for topical administration can be formulated as ointments, creams, suspensions, lotions, powders, solutions, pastes, gels, sprays, aerosols, or oils. In some embodiments for treatments of the eye or other external tissues, for example the mouth or the skin, the pharmaceutical formulations are applied as a topical ointment or cream. When formulated in an ointment, the one or more of the polypeptides, polynucleotides, vectors, cells, and combinations thereof described herein can be formulated with a paraffinic or water-miscible ointment base. In some embodiments, the active ingredient can be formulated in a cream with an oil-in-water cream base or a water-in-oil base. Dosage forms adapted for topical administration in the mouth include lozenges, pastilles, and mouth washes.

[0442] Dosage forms adapted for nasal or inhalation administration include aerosols, solutions, suspension drops, gels, or dry powders. In some embodiments, the one or more of the polypeptides, polynucleotides, vectors, cells, and combinations thereof described herein is contained in a dosage form adapted for inhalation is in a particle-size-reduced form that is obtained or obtainable by micronization. In some embodiments, the particle size of the size reduced (e.g., micronized) compound or salt or solvate thereof, is defined by a D50 value of about 0.5 to about 10 microns as measured by an appropriate method known in the art. Dosage forms adapted for administration by inhalation also include particle dusts or mists. Suitable dosage forms wherein the carrier or excipient is a liquid for administration as a nasal spray or drops include aqueous or oil solutions/suspensions of an active ingredient (e.g., the one or more of the polypeptides, polynucleotides, vectors, cells, and combinations thereof described herein and/or auxiliary active agent), which may be generated by various types of metered dose pressurized aerosols, nebulizers, or insufflators.

[0443] In some embodiments, the dosage forms can be aerosol formulations suitable for administration by inhalation. In some of these embodiments, the aerosol formulation can contain a solution or fine suspension of the one or more of the polypeptides, polynucleotides, vectors, cells, and combinations thereof described herein and a pharmaceutically acceptable aqueous or non-aqueous solvent. Aerosol formulations can be presented in single or multi-dose quantities in sterile form in a sealed container. For some of these embodiments, the sealed container is a single dose or multi-dose nasal or an aerosol dispenser fitted with a metering valve (e.g., metered dose inhaler), which is intended for disposal once the contents of the container have been exhausted.

[0444] Where the aerosol dosage form is contained in an aerosol dispenser, the dispenser contains a suitable propellant under pressure, such as compressed air, carbon dioxide, or an organic propellant, including but not limited to a hydrofluorocarbon. The aerosol formulation dosage forms in other embodiments are contained in a pump-atomizer. The pressurized aerosol formulation can also contain a solution or a suspension of one or more of the polypeptides, polynucleotides, vectors, cells, and combinations thereof described herein. In further embodiments, the aerosol formulation can also contain co-solvents and/or modifiers incorporated to improve, for example, the stability and/or taste and/or fine particle mass characteristics (amount and/or profile) of the formulation. Administration of the aerosol formulation can be once daily or several times daily, for example 2, 3, 4, or 8 times daily, in which 1, 2, or 3 doses are delivered each time.

[0445] For some dosage forms suitable and/or adapted for inhaled administration, the pharmaceutical formulation is a dry powder inhalable formulation. In addition to the one or more of the polypeptides, polynucleotides, vectors, cells, and combinations thereof described herein, an auxiliary active ingredient, and/or pharmaceutically acceptable salt thereof, such a dosage form can contain a powder base such as lactose, glucose, trehalose, manitol, and/or starch. In some of these embodiments, the one or more of the polypeptides, polynucleotides, vectors, cells, and combinations thereof described herein is in a particle-size reduced form. In further embodiments, a performance modifier, such as L-leucine or another amino acid, cellobiose octaacetate, and/or metals salts of stearic acid, such as magnesium or calcium stearate.

[0446] In some embodiments, the aerosol dosage forms can be arranged so that each metered dose of aerosol contains a predetermined amount of an active ingredient, such as the one or more of the one or more of the polypeptides, polynucleotides, vectors, cells, and combinations thereof described herein.

[0447] Dosage forms adapted for vaginal administration can be presented as pessaries, tampons, creams, gels, pastes, foams, or spray formulations. Dosage forms adapted for rectal administration include suppositories or enemas.

[0448] Dosage forms adapted for parenteral administration and/or adapted for any type of injection (e.g., intravenous, intraperitoneal, subcutaneous, intramuscular, intradermal, intraosseous, epidural, intracardiac, intraarticular, intracavemous, gingival, subginigival, intrathecal, intravireal, intracerebral, and intracerebroventricular, and others) can include aqueous and/or non-aqueous sterile injection solutions, which can contain anti-oxidants, buffers, bacteriostats, solutes that render the composition isotonic with the blood of the subject, and aqueous and non-aqueous sterile suspensions, which can include suspending agents and thickening agents. The dosage forms adapted for parenteral administration can be presented in a single-unit dose or multi-unit dose containers, including but not limited to sealed ampoules or vials. The doses can be lyophilized and resuspended in a sterile carrier to reconstitute the dose prior to administration. Extemporaneous injection solutions and suspensions can be prepared in some embodiments, from sterile powders, granules, and tablets.

[0449] Dosage forms adapted for ocular administration can include aqueous and/or nonaqueous sterile solutions that can optionally be adapted for injection, and which can optionally contain anti-oxidants, buffers, bacteriostats, solutes that render the composition isotonic with the eye or fluid contained therein or around the eye of the subject, and aqueous and nonaqueous sterile suspensions, which can include suspending agents and thickening agents. Dosage forms for the eye can be adapted for topical administration to the eye, such as drops, suspensions, gels, hydrogels (e.g., contact lenses) and/or the like.

[0450] For some embodiments, the dosage form contains a predetermined amount of the one or more of the polypeptides, polynucleotides, vectors, cells, and combinations thereof described herein per unit dose. In some embodiments, the predetermined amount of the Such unit doses may therefore be administered once or more than once a day. Such pharmaceutical formulations may be prepared by any of the methods well known in the art.

[0451] In some embodiments, the pharmaceutical formulation and/or dosage form, is adapted for improved delivery and/or efficacy of a viral particle, particularly an AAV. In some embodiments, a viral particle or vector such as an AAV particle or vector, of the present invention is PEGylated. In some embodiments, the PEGlyation can improve the pharmacokinetics and/or pharmacodynamics of the viral particles, particularly AAV particles. In some embodiments, the engineered capsid polypeptides of the present invention, including but not limited to the engineered AAV capsid polypeptides are modified with one or more azide moieties which can then be orthogonally conjugated to one or more polyethylene glycols (PEGs) via click chemistry. In some embodiments, this approach can increase the stability (e.g., by 1-3 or more fold) and/or reduce immune system detection of the viral vectors (e.g., antibody recognition can be reduced by 0.1 to 2 or more fold). In some embodiments, the PEG used for PEGlyation is PEG 2000. PEGylated AAV2 particles via amine functionalities have been shown to protect the virus from neutralization and enable significant levels of gene expression upon re-administration without compromising the patient's immune system. See e.g., Harris and Chess. Le at al. Nat Rev Drug Discov, 2 (3) (2003), pp. 214-221, Brocchini et al., Nat Protoc, 1 (5) (2006), pp. 2241-2252, Gupta et al., J Cell Commun Signal, 13 (3) (2019), pp. 319-330, Pelegri-Oday et al., J. Am. Chem. Soc. 2014, 136, 41, 14323-14332, Le et al., J Control Release, 108 (1) (2005), pp. 161-177, and Lee et al. Biotechnol Bioeng, 92 (1) (2005), pp. 24-34, the teachings of which can be adapted for use with the present invention.

[0452] In some embodiments, the polypeptide compositions, viral vectors, viral polypeptides (e.g., capsid polypeptides and/or capsids), and/or viral particles are modified so as to improve transduction, stability, and/or other property of the polypeptide compositions, viral vectors, viral polypeptides, and/or viral particles, (in addition to inclusion of a n-mer motif described herein). In some embodiments, the modification(s) increase the stability and/or efficacy of the viral vectors, viral polypeptides (e.g., capsid polypeptides and/or capsids), and/or viral particles. In some embodiments, the capsid or capsid polypeptides thereof are modified by mutation of one or more serine, threonine, and/or lysine residues such that they are replaced with an alanine or arginine residues. In some embodiments, the modification is inclusion of an azide moiety in a viral capsid or capsid polypeptide of the present invention, such an AAV capsid or capsid polypeptide of the present invention. In some embodiments, the azide is introduced into the VP3 capsid domain. See e.g., Lam et al., J Pharm Sci, 86 (11) (1997), pp. 1250-1255, Le et al., J Control Release, 108 (1) (2005), pp. 161-177, Wonganan et al., Mol Pharm, 9 (7) (2011), pp. 78-92, Yao et al., Molecules, 22 (7) (2017), pp. 1-15, Zhao et al., J Virol, 90 (9) (2016), pp. 4262-4268, Gabriel et al. Hum Gene Ther Methods, 24 (2) (2013), pp. 80-93, Zhang et al., Biomaterials, 80 (2016), pp. 134-145, Mevel et al., Chem Sci, 11 (4) (2020), pp. 1122-1131, the teachings of which can be adapted for use with the present invention.

[0453] Peptide oxidation is a major cause of chemical instability and also sometimes linked to physical instability. For example, amino acids such as methionine, cysteine, histidine, tyrosine and tryptophan in peptides are susceptible to oxidation. More specifically viral capsid polypeptides can oxidize upon exposure to light and due to metal ion impurities in the raw materials and excipients, common to pharmaceutical formulations leading to a loss in functionality. In some embodiments, oxidation of the polypeptide compositions viral vectors, viral polypeptides (e.g., capsid polypeptides and/or capsids), and/or viral particles can be decreased and/or prevented by including free amino acids such as methionine and histidine and/or metal ion scavengers such as ethanol, EDTA and DTPA in a pharmaceutical formulation of the polypeptide compositions viral vectors, viral polypeptides (e.g., capsid polypeptides and/or capsids), and/or viral particles of the present invention. See e.g., Wang et al., Int J Pharm, 185 (1999), pp. 129-188, Evans et al., J Pharm Sci, 93 (10) (2004), pp. 2458-2475, Reinauer et al., J Pharm Sci, 109 (1) (2020), pp. 818-829, Kamerzell et al., Adv Drug Deliv Rev, 63 (13) (2011), pp. 1118-1159, Shah et al., J Pharm Sci, 107 (11) (2018), pp. 2789-2803, Shah et al., Int J Pharm, 547 (1-2) (2018), pp. 438-449, Tsai et al., Pharm Res An Off J Am Assoc Pharm Sci, 10 (5) (1993), pp. 649-659, Master et al., J Pharm Sci, 99 (5) (2010), pp. 2386-2398, and Lam et al., J Pharm Sci, 86 (11) (1997), pp. 1250-1255, the teachings of which can be adapted for use with the present invention.

[0454] Protein aggregation can cause an immunogenic response to protein compositions, including viral capsid compositions. In some embodiments, aggregation of proteins in a formulation, such as viral particles/vectors/capsids can be reduced by inclusion of one or more surfactants in the formulation. In some embodiments, a pharmaceutical formulation containing a protein composition, viral particle, viral capsid, and/or viral capsid polypeptide (e.g., an AAV capsid or capsid polypeptide) of the present invention contains one or more surfactants. In some embodiments, the surfactant is a nonionic surfactant. In some embodiments, the nonionic surfactant is a polysorbate (e.g., polysorbate 20, polysorbate 80). In some embodiments, the nonionic surfactant is poloxamer 188. Without being bound by theory, inclusion of a surfactant can also protect proteins against surface-induced damaged by competing with the proteins for adsorption sites on surfaces, of e.g., containers and delivery devices. See also e.g., Wang et al., Int J Pharm, 289 (1-2) (2005), pp. 1-30, Rodrigues et al., Pharm Res, 36 (2) (2019), pp. 1-20, Wright, J. F. Mol Ther, 12 (1)(2005), pp. 171-178, and Jones et al., ACS Symp Ser, 675 (1997), pp. 206-222, the teachings of which can be adapted for use with the present invention.

[0455] Salt can also affect the protein compositions, viral particles, viral vectors, viral capsids, and/or viral capsid proteins in a formulation. At low concentrations, salts affect electrostatic interactions in proteins. Therefore, this effect could be stabilizing when there are repulsive interactions leading to protein unfolding, or destabilizing when there are stabilizing salt bridges or ion pairs in the protein. At high salt concentrations, electrostatic interactions are saturated; the dominant effect of salt is on solvent properties of the solution. The stabilizing salts increase surface tension at water-protein interface and strengthen hydrophobic interactions by keeping hydrophobic groups away from water molecules, inducing preferential hydration of proteins. The salt effect strongly depends on the salt concentration and solution pH, as pH determines the charged state of ionizable amino acids in protein groups. In some embodiments, the salt composition and amounts are optimized for delivery and efficacy of the protein compositions, viral particles, viral vectors, viral capsids, and/or viral capsid proteins of the present invention.

[0456] Buffer and pH can influence conformational and colloidal stabilities of proteins, particularly viral capsid proteins. In some embodiments, the pharmaceutical formulation contains one or more buffers so as to optimize the pH of the formulation. The pH determines the net charge on the protein molecule and the nature of electrostatic interactions. Generally, the higher the net charge of the protein, the lower will be the aggregation propensity due to electrostatic repulsions, and higher will be the colloidal stability. In some embodiments, the pharmaceutical formulation contains a buffer optimized to the protein composition, viral particle, viral capsid, or capsid protein of the present invention such that the pH of the formulation is such that it results in a greater net charge of the protein as compared to an unbuffered formulation. In some embodiments, the buffer results in a pharmaceutical formulation of a protein composition, viral particle, viral capsid, or capsid protein of the present invention that has reduced aggregation and/or increased colloidal stability as compared to the same protein composition, viral particle, viral capsid, or capsid protein of the present invention in a formulation without said buffer. See also e.g., Marshall et al., Biochemistry, 50 (12)(2011), pp. 2061-2071, Kamihira et al., J Biol Chem, 278 (5)(2003), pp. 2859-2865, yun et al., Biophys J, 92 (11) (2007), pp. 4064-4077, Raman et al., Biochemistry, 44 (4) (2005), pp. 1288-1299, Jain and Udgaonkar et al., Biochemistry, 49 (35) (2010), pp. 7615-7624, and Klement et al., J Mol Biol, 373 (5) (2007), pp. 1321-1333, the teachings of which can be adapted for use with the present invention.

[0457] Osmolytes are small organic compounds cand can be included in a pharmaceutical formulation of the preset invention to stabilize proteins (e.g., the protein composition, viral particle, viral capsid, or capsid protein of the present invention) against denaturation and aggregation. Proteins in an aqueous solution exists in equilibrium between the folded (F) and unfolded (U) states. Without being bound by theory, stabilization by osmolytes occurs by a preferential exclusion mechanism where osmolytes shift the equilibrium towards the F-state. In some embodiments, a pharmaceutical formulation of the present invention includes one or more osmolytes. In some embodiments, the osmolyte(s) are sucrose, glycine, mannitol, histidine, dextrose, arginine, trehalose, lactose, or any combination thereof. In some embodiments, the osmolyte, such as a sugar (e.g., sucrose) can be used in a culture media used to produce viral particles, such as those of the present invention. In some embodiments, inclusion of the osmolyte in culture media during viral particle production increases viral particle yield by 0.1 to 5 fold or more. In some embodiments, the osmolyte incorporated into such a culture media is sucrose and optionally the concentration of the sucrose is about 0.2M. See also e.g., Deorkar and Thiyagarajan., Bio Pharm Int, 29 (10) (2016), pp. 26-30, Wang, W., Int J Pharm, 185 (1999), pp. 129-188, Barnett et al., J Phys Chem B, 120 (13)(2016), pp. 3318-3330, Amani et al., Protein J, 36 (2) (2017), pp. 147-153, Auton et al., Biophys Chem, 159 (1) (2011), pp. 90-99, Kendrick et al., Proc Natl Acad Sci USA, 94 (22) (1997), pp. 11917-11922, Timasheff, S. N., Proc Natl Acad Sci USA, 99 (15) (2002), pp. 9721-9726, Wlodarczyk et al., Eur J Pharm Biopharm, 131 (2018), pp. 92-98, and Rego et al., bioRxiv. Published online (2018), pp. 1-21, the teachings of which can be adapted for use with the present invention.

[0458] In some embodiments, the pH of the formulation is basic pH. Without being bound by theory, a basic pH can reduce disulfide formation and/or exchange, thus improving the stability and/or efficacy of the polypeptide compositions, such as capsid polypeptide(s) (e.g., AAV capsid polypeptide) of the present invention present in the formulation.

[0459] In some embodiments, as is also further described herein, the protein compositions, such as capsid polypeptide(s) (e.g., AAV capsid polypeptides) of the present invention can be encapsulated in a liposome, exosome, or other delivery vehicle. Without being bound by theory, such an approach can mask the protein compositions, such as capsid polypeptide(s) (e.g., AAV capsid polypeptides) of the present invention from immune components such as antibodies, thus reducing the immunogenicity of the composition.

### Kits

[0460] Also described herein are kits that contain one or more of the one or more of the polypeptides, polynucleotides, vectors, cells, or other components described herein and combinations thereof and pharmaceutical formulations described herein. In embodiments, one or more of the polypeptides, polynucleotides, vectors, cells, and combinations thereof described herein can be presented as a combination kit. As used herein, the terms “combination kit” or “kit of parts” refers to the compounds, or formulations and additional components that are used to package, screen, test, sell, market, deliver, and/or administer the combination of elements or a single element, such as the active ingredient, contained therein. Such additional components include but are not limited to, packaging, syringes, blister packages, bottles, and the like. The combination kit can contain one or more of the components (e.g., one or more of the one or more of the polypeptides, polynucleotides, vectors, cells, and combinations thereof) or formulation thereof can be provided in a single formulation (e.g., a liquid, lyophilized powder, etc.), or in separate formulations. The separate components or formulations can be contained in a single package or in separate packages within the kit. The kit can also include instructions in a tangible medium of expression that can contain information and/or directions regarding the content of the components and/or formulations contained therein, safety information regarding the content of the components(s) and/or formulation(s) contained therein, information regarding the amounts, dosages, indications for use, screening methods, component design recommendations and/or information, recommended treatment regimen(s) for the components(s) and/or formulations contained therein. As used herein, “tangible medium of expression” refers to a medium that is physically tangible or accessible and is not a mere abstract thought or an unrecorded spoken word. “Tangible medium of expression” includes, but is not limited to, words on a cellulosic or plastic material, or data stored in a suitable computer readable memory form. The data can be stored on a unit device, such as a flash memory drive or CD-ROM or on a server that can be accessed by a user via, e.g., a web interface.

[0461] In one embodiment, the invention provides a kit comprising one or more of the components described herein. In some embodiments, the kit comprises a vector system and instructions for using the kit. In some embodiments, the vector system includes a regulatory element operably linked to one or more engineered targeting moiety, polypeptide, viral (e.g., AAV) delivery system polynucleotides, as described elsewhere herein and, optionally, a cargo molecule, which can optionally be operably linked to a regulatory element. The one or more engineered targeting moiety, polypeptide, viral (e.g., AAV) delivery system polynucleotides, can be included on the same or different vectors as a cargo molecule capable of being delivered by the engineered targeting moiety, polypeptide, viral (e.g., AAV) delivery system described herein in embodiments containing a cargo molecule within the kit.

[0462] In some embodiments, the kit comprises a vector system and instructions for using the kit. In some embodiments, the vector system comprises (a) a first regulatory element operably linked to a direct repeat sequence and one or more insertion sites for inserting one or more guide sequences up- or downstream (whichever applicable) of the direct repeat sequence, wherein when expressed, the guide sequence directs sequence-specific binding of a Cas9 CRISPR complex to a target sequence in a eukaryotic cell, wherein the Cas9 CRISPR complex comprises a Cas9 enzyme complexed with the guide sequence that is hybridized to the target sequence; and/or (b) a second regulatory element operably linked to an enzyme-coding sequence encoding said Cas9 enzyme comprising a nuclear localization sequence. Where applicable, a tracr sequence may also be provided. In some embodiments, the kit comprises components (a) and (b) located on the same or different vectors of the system. In some embodiments, component (a) further comprises two or more guide sequences operably linked to the first regulatory element, wherein when expressed, each of the two or more guide sequences direct sequence specific binding of a CRISPR complex to a different target sequence in a eukaryotic cell. In some embodiments, the Cas9 enzyme comprises one or more nuclear localization sequences of sufficient strength to drive accumulation of said CRISPR enzyme in a detectable amount in the nucleus of a eukaryotic cell. In some embodiments, the CRISPR enzyme is a type V or VI CRISPR system enzyme. In some embodiments, the CRISPR enzyme is a Cas9 enzyme. In some embodiments, the Cas9 enzyme is derived from Francisella tularensis 1, Francisella tularensis subsp. novicida, Prevotella albensis, Lachnospiraceae bacterium MC2017 1, Butyrivibrio proteoclasticus, Peregrinibacteria bacterium GW2011_GWA2_33_10, Parcubacteria bacterium GW2011_GWC2_44_17, Smithella sp. SCADC, Acidaminococcus sp. BV3L6, Lachnospiraceae bacterium MA2020, Candidatus Methanoplasma termitum, Eubacterium eligens, Moraxella bovoculi 237, Leptospira inadai, Lachnospiraceae bacterium ND2006, Porphyromonas crevioricanis 3, Prevotella disiens, or Porphyromonas macacae Cas9 (e.g., modified to have or be associated with at least one DD), and may include further alteration or mutation of the Cas9, and can be a chimeric Cas9. In some embodiments, the DD-CRISPR enzyme is codon-optimized for expression in a eukaryotic cell. In some embodiments, the DD-CRISPR enzyme directs cleavage of one or two strands at the location of the target sequence. In some embodiments, the DD-CRISPR enzyme lacks or substantially DNA strand cleavage activity (e.g., no more than 5% nuclease activity as compared with a wild-type enzyme or enzyme not having the mutation or alteration that decreases nuclease activity). In some embodiments, the first regulatory element is a polymerase III promoter. In some embodiments, the second regulatory element is a polymerase II promoter. In some embodiments, the guide sequence is at least 16, 17, 18, 19, 20, 25 nucleotides, or between 16-30, or between 16-25, or between 16-20 nucleotides in length.

### Methods of Use

### General Discussion

[0463] The compositions containing the CNS-specific targeting moieties described herein (e.g., the engineered targeting moiety system polynucleotides, polypeptides, vector(s), engineered cells, engineered viral (e.g., AAV) capsids, and viral and other particles) can be used generally to package and/or deliver one or more cargo polynucleotides or other cargo types to a recipient cell or cell population (including tissues, organs, and organsims). In some embodiments, delivery, is done in a cell-specific manner based upon the specificity of the targeting moiety(ies). In some embodiments, the cell-specificity is conferred via the n-mer insert(s) included in the targeting moiety as previously discussed. In some embodiments, delivery is done in cell-specific manner based upon the tropism of the engineered viral (e.g., AAV) capsid. In some embodiments, engineered targeting moiety(ies), polypeptides, viral (e.g., AAV) capsids, particles, viral (e.g., AAV) particles, compositions thereof, and/or cells discussed herein can be administered to a subject or a cell, tissue, and/or organ and facilitate the transfer and/or integration of the cargo polynucleotide to the recipient cell. In other embodiments, engineered cells capable of producing engineered targeting moiety(ies), polypeptides, viral (e.g., AAV) capsids, particles, viral (e.g., AAV) particles and/or compositions thereof can be generated from engineered targeting moiety system molecules (e.g., polynucleotides, vectors, and vector systems, etc.). In some embodiments, the engineered targeting moiety(ies), polypeptides, viral (e.g., AAV) capsids, particles, viral (e.g., AAV) particles and/or compositions thereof can be delivered to a subject or a cell, tissue, and/or organ. When delivered to a subject, they engineered delivery system molecule(s) can transform a subject's cell in vivo or ex vivo to produce an engineered cell that can be capable of making an engineered targeting moiety(ies), polypeptides, viral (e.g., AAV) capsids, particles, viral (e.g., AAV) particles and/or compositions thereof, which can be released from the engineered cell and deliver cargo molecule(s) to a recipient cell in vivo or produce personalized engineered polypeptides, viral (e.g., AAV) particles, and/or other particles for reintroduction into the subject from which the recipient cell was obtained. In some embodiments, an engineered cell can be delivered to a subject, where it can release produced engineered targeting moieties, polypeptides, viral (e.g., AAV) particles, and/or other particles such that they can then deliver a cargo (e.g., cargo polynucleotide(s)) to a recipient cell. These general processes can be used in a variety of ways to treat and/or prevent disease or a symptom thereof in a subject, generate model cells, generate modified organisms, provide cell selection and screening assays, in bioproduction, and in other various applications.

[0464] In some embodiments, the engineered targeting moieties, polypeptides, viral (e.g., AAV) particles, and/or other particles, polynucleotides, vectors, and systems thereof can be used to generate engineered AAV capsid variant libraries that can be mined for variants with a desired cell-specificity, such as CNS specificity. The description provided herein as supported by the various Examples can demonstrate that one having a desired cell-specificity in mind could utilize the present invention as described herein to obtain a capsid with the desired cell-specificity, such as CNS specificity.

### Therapeutics

[0465] In some embodiments, one or more molecules of the engineered delivery system, engineered targeting moieties, polypeptides, viral (e.g., AAV) particles, and/or other particles, polynucleotides, vectors, systems thereof, engineered cells, and/or formulations thereof described herein can be delivered to a subject in need thereof as a therapy for one or more diseases. In some embodiments, the disease to be treated is a genetic or epigenetic based disease. In some embodiments, the disease to be treated is not a genetic or epigenetic based disease. In some embodiments, one or more molecules of the engineered delivery system, engineered targeting moieties, polypeptides, viral (e.g., AAV) particles, and/or other particles, polynucleotides, vectors, and systems thereof, engineered cells, and/or formulations thereof described herein can be delivered to a subject in need thereof as a treatment or prevention (or as a part of a treatment or prevention) of a disease. It will be appreciated that the specific disease to be treated and/or prevented by delivery of an engineered cell and/or engineered can be dependent on the cargo molecule packaged into an engineered AAV capsid particle.

[0466] Generally, the compositions described herein can be used in a therapy for treating or preventing a CNS disease, disorder, or a symptom thereof. It will be appreciated that a CNS disease or disorder refers to any disease or disorder whose pathology involves or affects one or more cell types of the central nervous system. In some embodiments, the CNS disease or disorder is one whose primary pathology involves one or more cell types of the CNS. In some embodiments, one or more other cell types outside of the CNS are involved in the pathology of the CNS disease, such as a muscle cell or a peripheral nervous system cell. In some embodiments, the CNS disease or disorder can be caused by one or more genetic abnormalities. In some embodiments, the CNS disease or disorder is not caused by a genetic abnormality. Non-genetic causes of diseases include infection, cancer, physical trauma and others that will be appreciated by those of skill in the art. It also will be appreciated that gene modification approaches to treating disease can be applied to treat and/or prevent both genetic diseases and non-genetic diseases. For example, in the case of non-genetic diseases, a gene therapy approach can be used to modify the cause of the non-genetic disease (e.g., a cancer or infectious organism) such that the cause is no longer disease causing (e.g., by eliminating or rendering non-functional the cancer cells or infectious organism).

[0467] Exemplary CNS diseases and disorders include, without limitation, Friedreich's Ataxia, Dravet Syndrome, Spinocerebellar Ataxia Type 3, Niemann Pick Type C, Huntington's Disease, Pompe Disease, Myotonic Dystrophy Type 1, Gluta Deficiency Syndrome (De Vivo Syndrome), Tay-Sachs, Spinal Muscular Atrophy, Alzheimer's disease, Amyotrophic lateral sclerosis (ALS), Danon disease, Rett Syndrome, Angleman Syndrome, infantile neuronal dystorpy, Gaucher's disease, Krabbe disease, metachromatic leukodystrophy, Salla disease, Farber disease or Spinal Musular Atrophy with progressive myoclonic Epilepsy (also reffered to as Jankovic-Rivera syndrome, Unverricht-Lundborg disease, AADC deficiency, Parkinson's disease, Batten disease, a neuronal ceroid lipofuscinosis disease, giant axonal neuropathy, a mucopolysaccharidosis disease (e.g., Hurler syndrome, MPS III A-D), neurofibromatosis, a spinocerebellar ataxia disease, Sandoff disease, GM2 gangliosidosis, Canavan disease, Cockayne syndrome, a pain disease or disorder, a neuropathy or nerve damage, or any combination thereof. Others are described elsewhere herein and/or will be appreciated by those of ordinary skill in the art in view of the description provided herein.

[0468] In some embodiments, the compositions described herein can be used for treating or preventing an eye disease or disorder. It will be appreciated that an eye disease or disorder is a disease or disorder that has a pathology or clinical symptom that involves one or more cells or cell types of the eye, including but not limited to, the optic nerve, rods, cones, retinal cells (e.g., photoreceptors, bipolar cells, ganglion cells, horizontal cells, and amacrine cells), and/or the like. The eye disease or disorder can be of genetic or non-genetic origin. Exemplary eye diseases and disorders include, without limitation, Stargardt disease, a Leber's congenital amaurosis (LCA) (e.g., Leber's congenital amaurosis type 2, LEBER CONGENITALAMAUROSIS (LCA) ANDEARLY-ONSET SEVERE RETINALDYSTROPHY (EOSRD)), Choroideremia, a macular degeneration, diabetic retinopathy, a retinopathy, vitelliform macular dystrophy, a macular dystrophy, Sorsby's fundus dystrophy, cataracts, glaucoma, optic neuropathies, Marfan syndrome, myopia, polypoidal choroidal vasculopathies, retinitis pigmentosa, uveal melanoma, X-linked retinoschisis, pattern dystrophy, achromatopsia, Blue cone monochromatism, Bornholm eye disease, ADGUCA1A-associated COD/CORD, autosomal dominant PRPH2 associated CORD, X-linkedRPGR-associatedCOD/CORD, fundus albipunctatus, Enhanced S-conesyndrome, Bietti crystalline comeoretinaldystorphy, or any combination thereof.

[0469] In some embodiments, the compositions described herein can be used for treating or preventing an inner ear disease or disorder. It will be appreciated that an eye disease or disorder is a disease or disorder that has a pathology or clinical symptom that involves one or more cells or cell types of the ear, and more particularly the inner ear, including but not limited to, hair cells, pillar cells, Boettcher's cells, Claudius' cells, spiral ganglion neurons, and Deiters' cells (phalangeal cells). The inner ear disease or disorder can be of genetic or non-genetic origin. Exemplary inner ear disease and disorders include, without limitation, GJB-2 deafness, Jeryell and Lange-Nielsen syndrome, Usher syndrome, Alport syndrome, Branchio-oto-renal syndrome, Waardenburg syndrome, Pendred syndrome, Stickler syndrome, Treacher Collins syndrome, CHARGE syndrome, Norrie disease, Perrault syndrome, Autosomal dominant Nonsyndromic hearing loss, utosomal Recessive Nonsyndromic Hearing Loss, X-linked nonsyndromic hearing loss, an auditory neuropathy, a congenital hearing loss, or any combination thereof.

[0470] In some embodiments, the compositions comprising a CNS specific targeting moiety of the present invention and/or cargos that can be delivered by such compositions can be used to treat or prevent pain or a pain disease or disorder in a subject. In some embodiments, a cargo is capable of modulating sensitivity to or pain sensation/perception in a subject. It will be appreciated that depending on the disease or condition, it can be desirable to increase pain sensitivity or perception (e.g., in the case of disease where there is no pain sensitivity) or decrease pain sensitivity, sensation, and/or perception (e.g., neuropathies and others).

[0471] In some embodiments, the cargo molecule can treat or prevent a Pain disease or disorder or pain resulting from a disease or disorder. In some embodiments, the pain disease or disorder causes a deleterious insensitivity or lack of sensitivity to pain. In some embodiments, the pain is due to trauma or damage to a tissue and/or nerve(s)/neurons that can be the result of disease (e.g., ischemia, virus, etc.) or external trauma or mechanical pain (e.g., acute injury, surgical wounds and/or amputation, thermal exposure, etc. In some embodiments, the pain disease or disorder involves dysfunction of one or more neurons, ganglions, or other cells of the CNS and/or peripheral nervous system. In some embodiments, the disease or disorder generates inappropriate, hyper-, or other wise deleterious pain negatively impacting quality of life. Exemplary pain diseases or disorders include, without limitation, HSAN-1, HSAN-2, HSAN-3 (familial dysautonomia—pain free phenotype), HSAN-4 (CIPA), mutilated foot, erythermalagia, paroxysmal extreme pain, and other insensitivities to pain, neuropathic pain, other chronic pain, and/or the like. Exemplary targets for genetic modifications for pain modulation include those involved in signal transduction and/or conduction and/or synaptic transmission (TRPV1/2/3/4, P2XR3, TRPM8, TRPA1, P2RX3, P2RY, BDKRB1/2, Htr3A, ACCNs, TRPV4, TRPC/P, ACCN1/2, SCN10A, SCN11A, SCN1,3, 4A, SCN9A, KCNQ, (other K+ channel genes), NR1, 2, GRIA1-4, GRIC1-5, NK1R, CACNA1A-S, CACNA2D1; genes of the microglia (e.g., TLR2/4. P2RX4/7, CCL2, CX3CRN1), genes of the CNS (e.g., BDNF, OPRD1/K1/M1, CNR1, GABRs, TNF, PLA2), genes of the PNS (e.g., IL1/6/12/18, COX-2, NTRK1, NGF, GDNF, TNF, LIF, CCL2, CNR2), genes and/or any one or more of the SNPs set forth in Table 1 of Foulkes and Wood. PLOS Genetics. 2008. https://doi.org/10.1371/journal.pgen.1000086; any one or more genes associated with a heritable pain condition (e.g., SPTLC1, IkbKAP protein gene, CCT4, Nav1.7 gene); ion channel related genes (e.g., (SCN9A, CACNG2, ZSCAN20, SCN11A), Neurotransmission (OPRM1, COMT, PRKCA, SLCA4, MPZ, GCH1), Metabolism (GCH1, TF, CP, TFRC, ACO1, FXN, SLC11A2, B2M, BMP6), Immune Response (HLA-A, HLA-B, HLA-DQB1, HLA-DRB1, IL6, IL1R2, IL10, TNF-α, GFRA2, HMGB1P46), SCN9A (NaV1.7), SCN10A (NaV1.8) and SCN11A (NaV1.9), GAD, or any combination thereof. In some embodiments, the cargo is a glutamic acid decarboxylase (GAD) which can provide GABA to recue pain, such as neuropathic pain. In some embodiments, the pain-associated genes are modified using a CRISPRi approach (e.g., a cargo molecule can contain CRISPRi molecule(s). In some embodiments, the pain-associated genes are modified using a CRISPRi-KRAB approach. See also e.g., Wolfe et al., Pain Medicine, Volume 10, Issue 7, October 2009, Pages 1325-1330, Moreno A M, Glaucilene F C, Alemán F et al. Long-lasting analgesia via targeted in vivoepigenetic repression of Nav1.7. bioRxiv711812 (2019). https://www.biorxiv.org/content/10.1101/71, Foulkes and Wood. PLOS Genetics. 2008. https://doi.org/10.1371/journal.pgen.1000086, the teachings of which can be adapted for use with the present invention.

[0472] Genetic diseases that can be treated are discussed in greater detail elsewhere herein (see e.g., discussion on Gene-modification based-therapies below). Other diseases can include, but are not limited to, any of the following: cancer (such as glioblastoma or other brain or CNS cancers), Acubetivacter infections, actinomycosis, African sleeping sickness, AIDS/HIV, ameobiasis, Anaplasmosis, Angiostrongyliasis, Anisakiasis, Anthrax, Acranobacterium haemolyticum infection, Argentine hemorrhagic fever, Ascariasis, Aspergillosis, Astrovirus infection, Babesiosis, Bacterial meningitis, Bacterial pneumonia, Bacterial vaginosis, Bacteroides infection, balantidiasis, Bartonellosis, Baylisascaris infection, BK virus infection, Black Piedra, Blastocytosis, Blastomycosis, Bolivian hemorrhagic fever, Botulism, Brazillian hemmorhagic fever, brucellosis, Bubonic plague, Burkholderia infection, buruli ulcer, calicivirus invention, campylobacteriosis, Candidasis, Capillariasis, Carrion's disease, Cat-scratch disease, cellulitis, Chagas Disease, Chancroid, Chickenpox, Chikungunya, Chlamydia, Chlamydia pneumoniae, Cholera, Chromoblastomycosis, Chytridiomycosis, Clonochiasis, Clostridium difficile colitis, Coccidioidomycosis, Colorado tick fever, rhinovirus/coronavirus invection (common cold), Cretzfeldt-Jakob disease, Crimean-congo hemorrhagic fever, Cryptococcosis, Cryptosporidosis, Cutaneous larva migrans (CLM), cyclosporiasis, cysticercosis, cytomegalovirus infection, Dengue fever, Desmodesmus infection, Dientamoebiasis, Diptheria, Diphylobothriasis, Dracunculiasis, Ebola, Echinococcosis, Ehrlichiosis, Enterobiasis, Enterococcus infection, Enterovirus infection, Epidemic typhus, Erthemia Infectisoum, Exanthem subitum, Fasciolasis, Fasciolopsiasis, fatal familial insomnia, filarisis, Clostridum perfingens infection, Fusobacterium infection, Gas gangrene (clostridial myonecrosis), Geotrichosis, Gerstmann-Straussler-Scheinker syndrome, Giardasis, Glanders, Gnathostomiasis, Gonorrhea, Granuloma inguinales, Group A streptococcal infection, Group B streptococcal infection, Haemophilus influenzae infection, Hand, foot, and mouth disease, hanta virus pulmonary syndrome, heartland virus disease, Helicobacter pylori infection, hemorrhagi fever with renal syndrome, Hendra virus infection, Hepatitis (all groups A, B, C, D, E), hepes simplex, histoplasmosis, hookworm infection, human bocavirus infection, human ewingii erlichosis, Human granulocytic anaplasmosis, human metapneymovirus infection, human monocytic ehrlichosis, human papaloma virus, Hymenolepiasis, Epstein-Barr infection, mononucleosis, influenza, isoporisis, Kawasaki disease, Kingell kingae infection, Kuru, Lasas fever, Leginollosis (Legionnaires's disease and Potomac Fever), Leishmaniasis, Leprosy, Leptospirosis, Listeriosis, Lyme disease, lymphatic filariasis, lymphocytic choriomeningitis, Malaria, Marburg hemorrhagic feaver, measals, Middle East respiratory syndrome, Meliodosis, menigitis, Menigococcal disease, Metagonimiasis, Microsporidosis, Molluscum contagiosum, Monkeypox, Mumps, Murine typhus, Mycoplasma pneumonia, Mycoplasma genitalium infection, Mycetoma, Myiasis, Conjunctivitis, Nipah virus infection, Norovirus, Variant Creutzfeldt-Jakob disease, Nocardosis, Onchocerciasis, Opisthorchiasis, Paracoccidioidomycosis, Paragonimiasis, Pasteurellosis, Pdiculosisi capitis, Pediculosis corpis, Pediculosis pubis, pelvic inflammatory disease, pertussis, plague, pneumococcal infection, pneumocystis pneumonia, pneumonia, poliomyelitis, prevotella infection, primary amoebic menigoencephalitis, progressive multifocal leukoencephalopathy, Psittacosis, Qfever, rabies, relapsing fever, respiratory syncytial virus infection, rhinovirus infection, rickettsial infection, Rickettsialpox, Rift Valley Fever, Rocky Mountain Spotted Fever, Rotavirus infection, Rubella, Salmonellosis, SARS, Scabies, Scarlet fever, Schistosomiais, Sepsis, Shigellosis, Shingles, Smallpox, Sporotrichosisi, Staphlococcol infection (including MRSA), strongyloidiasis, subacute sclerosing panecephalitis, Syphillis, Taeniasis, tetanus, Trichophyton species infection, Tocariasis, Toxoplasmosis, Trachoma, Trichinosis, Trichuriasis, Tuberculosis, Tularemia, Typhoid Fever, Typhus Fever, Ureaplasma urealyticum infection, Valley fever, Venezuelan equine encephalitis, Venezuelan hemorrhagic fever, Vibrio species infection, Viral pneumonia, West Nile Fever, White Piedra, Yersinia pseudotuberculosis, Yersiniosis, Yellow fever, Zeaspora, Zika fever, Zygomycosis and combinationsthereof.

[0473] Other diseases and disorders or symptoms thereof that can be treated using embodiments of the present invention include, but are not limited to, endocrine diseases (e.g., Type I and Type II diabetes, gestational diabetes, hypoglycemia. Glucagonoma, Goitre, Hyperthyroidism, hypothyroidism, thyroiditis, thyroid cancer, thyroid hormone resistance, parathyroid gland disorders, Osteoporosis, osteitis deformans, rickets, ostomalacia, hypopituitarism, pituitary tumors, etc.), skin conditions of infections and non-infection origin, eye diseases of infectious or non-infectious origin, gastrointestinal disorders of infectious or non-infectious origin, cardiovascular diseases of infectious or non-infectious origin, brain and neuron diseases of infectious or non-infectious origin, nervous system diseases of infectious or non-infectious origin, muscle diseases of infectious or non-infectious origin, bone diseases of infectious or non-infectious origin, reproductive system diseases of infectious or non-infectious origin, renal system diseases of infectious or non-infectious origin, blood diseases of infectious or non-infectious origin, lymphatic system diseases of infectious or non-infectious origin, immune system diseases of infectious or non-infectious origin, mental-illness of infectious or non-infectious origin and the like.

[0474] In some embodiments, the disease to be treated is a CNS or CNS related disease or disorder, such as a genetic CNS disease or disorder. Such CNS or CNS related disease (including genetic CNS disease or disorders) are described in greater detail elsewhere herein.

[0475] Other diseases and disorders will be appreciated by those of skill in the art.

### Adoptive Cell Therapies

[0476] Generally speaking, adoptive cell transfer involves the transfer of cells (autologous, allogeneic, and/or xenogeneic) to a subject. The cells may or may not be modified and/or otherwise manipulated prior to delivery to the subject. Manipulation can include genetic modification by one or more gene modifying agents. Exemplary gene modifying agents and systems are described in greater detail elsewhere herein and will be appreciated by those of ordinary skill in the art. Such gene or other modification compositions or systems can be delivered to a cell to be modified for adoptive therapy by one or more of the compositions described herein containing a CNS specific targeting moiety.

[0477] In some embodiments, an engineered cell as described herein can be included in an adoptive cell transfer therapy. In some embodiments, an engineered cell as described herein can be delivered to a subject in need thereof. In some embodiments, the cell can be isolated from a subject, manipulated in vitro such that it is capable of generating an engineered AAV capsid particle described herein to produce an engineered cell and delivered back to the subject in an autologous manner or to a different subject in an allogeneic or xenogeneic manner. The cell isolated, manipulated, and/or delivered can be a eukaryotic cell. The cell isolated, manipulated, and/or delivered can be a stem cell. The cell isolated, manipulated, and/or delivered can be a differentiated cell. The cell isolated, manipulated, and/or delivered can be a nervous system cell, such as a central nervous system cell, including but not limited to a neuron, a glial cell, an astrocyte, a Schwann cell, a microglial cell, or other neuron support cell, and/or other brain or CNS cell, or any combination thereof. Other specific cell types will instantly be appreciated by one of ordinary skill in the art.

[0478] In some embodiments, the isolated cell can be manipulated such that it becomes an engineered cell as described elsewhere herein (e.g., contain and/or express one or more engineered delivery system molecules or vectors described elsewhere herein). Methods of making such engineered cells are described in greater detail elsewhere herein.

### Gene Drives

[0479] The present invention also contemplates use of the engineered delivery system molecules, vectors, engineered cells, and/or engineered AAV capsid particles described herein to generate a gene drive via delivery of one or more cargo polynucleotides or production of engineered AAV capsid particles with one or more cargo polynucleotides capable of producing a gene drive. In some embodiments, the gene drive can be a Cas-mediated RNA-guided gene drive e.g., Cas- to provide RNA-guided gene drives, for example in systems analogous to gene drives described in PCT Patent Publication WO 2015/105928. Systems of this kind may for example provide methods for altering eukaryotic germline cells, by introducing into the germline cell a nucleic acid sequence encoding an RNA-guided DNA nuclease and one or more guide RNAs. The guide RNAs may be designed to be complementary to one or more target locations on genomic DNA of the germline cell. The nucleic acid sequence encoding the RNA guided DNA nuclease and the nucleic acid sequence encoding the guide RNAs may be provided on constructs between flanking sequences, with promoters arranged such that the germline cell may express the RNA guided DNA nuclease and the guide RNAs, together with any desired cargo-encoding sequences that are also situated between the flanking sequences. The flanking sequences will typically include a sequence which is identical to a corresponding sequence on a selected target chromosome, so that the flanking sequences work with the components encoded by the construct to facilitate insertion of the foreign nucleic acid construct sequences into genomic DNA at a target cut site by mechanisms such as homologous recombination, to render the germline cell homozygous for the foreign nucleic acid sequence. In this way, gene-drive systems are capable of introgressing desired cargo genes throughout a breeding population (Gantz et al., 2015, Highly efficient Cas9-mediated gene drive for population modification of the malaria vector mosquito Anopheles stephensi, PNAS 2015, published ahead of print Nov. 23, 2015, doi:10.1073/pnas.1521077112; Esvelt et al., 2014, Concerning RNA-guided gene drives for the alteration of wild populations eLife 2014; 3:e03401). In select embodiments, target sequences may be selected which have few potential off-target sites in a genome. Targeting multiple sites within a target locus, using multiple guide RNAs, may increase the cutting frequency and hinder the evolution of drive resistant alleles. Truncated guide RNAs may reduce off-target cutting. Paired nickases may be used instead of a single nuclease, to further increase specificity. Gene drive constructs (such as gene drive engineered delivery system constructs) may include cargo sequences encoding transcriptional regulators, for example to activate homologous recombination genes and/or repress non-homologous end-joining. Target sites may be chosen within an essential gene, so that non-homologous end-joining events may cause lethality rather than creating a drive-resistant allele. The gene drive constructs can be engineered to function in a range of hosts at a range of temperatures (Cho et al. 2013, Rapid and Tunable Control of Protein Stability in Caenorhabditis elegans Using a Small Molecule, PLoS ONE 8(8): e72393. doi:10.1371/journal.pone.0072393).

### Transplantation and Xenotransplantation

[0480] The engineered AAV capsid system molecules, vectors, engineered cells, and/or engineered delivery particles described herein, can be used to deliver cargo polynucleotides and/or otherwise be involved in modifying tissues for transplantation between two different persons (transplantation) or between species (xenotransplantation). Such techniques for generation of transgenic animals are described elsewhere herein. Interspecies transplantation techniques are generally known in the art. For example, RNA-guided DNA nucleases can be delivered using via engineered AAV capsid polynucleotides, vectors, engineered cells, and/or engineered AAV capsid particles described herein and can be used to knockout, knockdown or disrupt selected genes in an organ for transplant (e.g., ex vivo (e.g., after harvest but before transplantation) or in vivo (in donor or recipient)), animal, such as a transgenic pig (such as the human heme oxygenase-1 transgenic pig line), for example by disrupting expression of genes that encode epitopes recognized by the human immune system, i.e., xenoantigen genes. Candidate porcine genes for disruption may for example include α(1,3)-galactosyltransferase and cytidine monophosphate-N-acetylneuraminic acid hydroxylase genes (see PCT Patent Publication WO 2014/066505). In addition, genes encoding endogenous retroviruses may be disrupted, for example the genes encoding all porcine endogenous retroviruses (see Yang et al., 2015, Genome-wide inactivation of porcine endogenous retroviruses (PERVs), Science 27 Nov. 2015: Vol. 350 no. 6264 pp. 1101-1104). In addition, RNA-guided DNA nucleases may be used to target a site for integration of additional genes in xenotransplant donor animals, such as a human CD55 gene to improve protection against hyperacute rejection.

[0481] Where it is interspecies transplantation (such as human to human), the engineered AAV capsid system molecules, vectors, engineered cells, and/or engineered delivery particles described herein, can be used to deliver cargo polynucleotides and/or otherwise be involved to modify the tissue to be transplanted. In some embodiments, the modification can include modifying one or more HLA antigens or other tissue type determinants, such that the immunogenic profile is more similar or identical to the recipient's immunogenic profile than to the donor's so as to reduce the occurrence of rejection by the recipient. Relevant tissue type determinants are known in the art (such as those used to determine organ matching) and techniques to determine the immunogenic profile (which is made up of the expression signature of the tissue type determinants) are generally known in the art.

[0482] In some embodiments, the donor (such as before harvest) or recipient (after transplantation) can receive one or more of the engineered AAV capsid system molecules, vectors, engineered cells, and/or engineered delivery particles described herein that are capable of modifying the immunogenic profile of the transplanted cells, tissue, and/or organ. In some embodiments, the transplanted cells, tissue, and/or organ can be harvested from the donor and the engineered AAV capsid system molecules, vectors, engineered cells, and/or engineered delivery particles described herein capable of modifying the harvested cells, tissue, and/or organ to be, for example, less immunogenic or be modified to have some specific characteristic when transplanted in the recipient can be delivered to the harvested cells, tissue, and/or organ ex vivo. After delivery the cells, tissue, and/or organs can be transplanted into the donor.

Gene Modification and Treatment of Diseases with Genetic or Epigenetic Embodiments that Affect the CNS, Brain, and/or Neurons, the Eye and/or Inner Ear

[0483] The engineered delivery system molecules, vectors, engineered cells, and/or engineered delivery particles described herein (e.g., those with one or more targeting moieties, such as a CNS-specific targeting moiety described herein) can be used to modify genes or other polynucleotides and/or treat diseases of the CNS, brain, and/or neurons, the eye, and/or the inner ear with genetic and/or epigenetic embodiments. As described elsewhere herein the cargo molecule can be a polynucleotide that can be delivered to a cell and, in some embodiments, be integrated into the genome of the cell. In some embodiments, the cargo molecule(s) can be one or more CRISPR-Cas system components. In some embodiments, the CRISPR-Cas components, when delivered by an engineered AAV capsid particles described herein can be optionally expressed in the recipient cell and act to modify the genome of the recipient cell in a sequence specific manner. In some embodiments, the cargo molecules that can be packaged and delivered by the engineered AAV capsid particles described herein can facilitate/mediate genome modification via a method that is not dependent on CRISPR-Cas. Such non-CRISPR-Cas genome modification systems will instantly be appreciated by those of ordinary skill in the art and are also, at least in part, described elsewhere herein. In some embodiments, modification is at a specific target sequence. In other embodiments, modification is at locations that appear to be random throughout the genome.

Exemplary CNS, Brain, and/or Neuronal Disease-Associated Genes

[0484] Examples of CNS, brain, and/or neuronal disease-associated genes and polynucleotides that can be modified using the engineered delivery AAV delivery system molecules, vectors, capsids, engineered cells, and/or engineered delivery particles described herein are described below.

[0485] In some embodiments, a therapeutic or preventive, such as the engineered AAV capsids and systems thereof as described elsewhere herein, can be delivered to a subject in need thereof or a cell thereof to treat a brain, neuron, neurological, and/or central nervous system disease or disorder (CNS). In some embodiments the brain, neuron, neurological, and/or CNS disease or disorder can be caused, directly or indirectly, by one or mutations in one or more of the following genes as compared to normal or non-pathological variant of the same: in the case of Amyotrophic lateral sclerosis (ALS): SOD1, ALS2, STEX, FUS, TARDBP, VEGF (VEGF-a, VEGF-b, VEGF-c); in the case of Alzheimer's disease: E1, CHIP, UCH, UBB, Tau, LRP, PICALM, Clusterin, PS1, SORL1, CR1, Vldlr, Uba1, Uba3, CHIP28, Aqp1, Uchl1, Uchl3, APP, AAA, CVAP, AD1, APOE, AD2, PSEN2, AD4, STM2, APBB2, FE65L1, NOS3, PLAU, URK, ACE, DCP1, ACE1, MPO, PACIP1, PAXIP1L, PTIP, A2M, BLMH, BMH, PSEN1, AD3); in the case of Autism: Mecp2, BZRAP1, MDGA2, Sema5A, Neurexin 1, GLO1, MECP2, RTT, PPMX, MRX16, MRX79, NLGN3, NLGN4, KIAA1260, AUTSX2; in the case of Fragile X Syndrome: FMR2, FXR1, FXR2, mGLUR5; in the case of Huntington's disease and disease like disorders: HD, IT15, PRNP, PRIP, JPH3, JP3, HDL2, TBP, SCA17); in the case of Parkinson's disease: NR4A2, NURR1, NOT, TINUR, SNCAIP, TBP, SCA17, SNCA, NACP, PARK1, PARK4, DJ1, PARK7, LRRK2, PARK8, PINK1, PARK6, UCHL1, PARK5, SNCA, NACP, PARK1, PARK4, PRKN, PARK2, PDJ, DBH, NDUFV2, PINK1, x-synuclein); in the case of Rett syndrome: MECP2, RTT, PPMX, MRX16, MRX79, CDKL5, STK9, MECP2, RTT, PPMX, MRX16, MRX79, x-Synuclein, DJ-1; in the case of Schizophrenia: Neuregulin1 (Nrg1), Erb4 (receptor for Neuregulin), Complexin1 (Cplx1), Tph1 Tryptophan hydroxylase, Tph2, Tryptophan hydroxylase 2, Neurexin 1, GSK3, GSK3a, GSK3b, 5-HTT (Slc6a4), COMT, DRD (Drd1a), SLC6A3, DAOA, DTNBP1, Dao (Dao1)); in the case of Secretase Related Disorders (APH-1 (alpha and beta), Presenilin (Psen1), nicastrin, (Ncstn), PEN-2, Nos1, Parp1, Nat1, Nat2); in the case of Trinucleotide Repeat Disorders (HTT (Huntington's Dx), SBMA/SMAX1/AR (Kennedy's Dx), FXN/X25 (Friedrich's Ataxia), ATX3 (Machado-Joseph's Dx), ATXN1 and ATXN2 (spinocerebellar ataxias), DMPK (myotonic dystrophy), Atrophin-1 and Atn1 (DRPLA Dx), CBP (Creb-BP—global instability), VLDLR (Alzheimer's), Atxn7, Atxn10); in the case of diseases or disorders associated with or involving aberrant or abnormal axonal guidance signaling in the brain, neurons, and/or CNS: PRKCE; ITGAM; ROCK1; ITGA5; CXCR4; ADAM12; IGF1; RAC1; RAP1A; EIF4E; PRKCZ; NRP1; NTRK2; ARHGEF7; SMO; ROCK2; MAPK1; PGF; RAC2; PTPN11; GNAS; AKT2; PIK3CA; ERBB2; PRKCI; PTK2; CFL1; GNAQ; PIK3CB; CXCL12; PIK3C3; WNT11; PRKD1; GNB2L1; ABL1; MAPK3; ITGA1; KRAS; RHOA; PRKCD; PIK3C2A; ITGB7; GLI2; PXN; VASP; RAF1; FYN; ITGB1; MAP2K2; PAK4; ADAM17; AKT1; PIK3R1; GLI1; WNT5A; ADAM10; MAP2K1; PAK3; ITGB3; CDC42; VEGFA; ITGA2; EPHA8; CRKL; RND1; GSK3B; AKT3; PRKCA; in the case of diseases or disorders associated with or involving aberrant or abnormal actin cytoskeleton signaling in the brain, neurons, and/or CNS: ACTN4; PRKCE; ITGAM; ROCK1; ITGA5; IRAK1; PRKAA2; EIF2AK2; RAC1; INS; ARHGEF7; GRK6; ROCK2; MAPK1; RAC2; PLK1; AKT2; PIK3CA; CDK8; PTK2; CFL1; PIK3CB; MYH9; DIAPH1; PIK3C3; MAPK8; F2R; MAPK3; SLC9A1; ITGA1; KRAS; RHOA; PRKCD; PRKAA1; MAPK9; CDK2; PIM1; PIK3C2A; ITGB7; PPP1CC; PXN; VIL2; RAF1; GSN; DYRK1A; ITGB1; MAP2K2; PAK4; PIP5K1A; PIK3R1; MAP2K1; PAK3; ITGB3; CDC42; APC; ITGA2; TTK; CSNK1A1; CRKL; BRAF; VAV3; SGK; in the case of diseases or disorders associated with or involving Huntington's Disease signaling: PRKCE; IGF1; EP300; RCOR1; PRKCZ; HDAC4; TGM2; MAPK1; CAPNS1; AKT2; EGFR; NCOR2; SP1; CAPN2; PIK3CA; HDAC5; CREB1; PRKCI; HSPA5; REST; GNAQ; PIK3CB; PIK3C3; MAPK8; IGF1R; PRKD1; GNB2L1; BCL2L1; CAPN1; MAPK3; CASP8; HDAC2; HDAC7A; PRKCD; HDAC11; MAPK9; HDAC9; PIK3C2A; HDAC3; TP53; CASP9; CREBBP; AKT1; PIK3R1; PDPK1; CASP1; APAF1; FRAP1; CASP2; JUN; BAX; ATF4; AKT3; PRKCA; CLTC; SGK; HDAC6; CASP3; in the case of diseases or disorders associated with or involving aberrant, pathologic, and/or abnormal apoptosis regulation and/or signaling in the brain, neurons, and/or CNS and/or diseases or disorders thereof: PRKCE; ROCK1; BID; IRAK1; PRKAA2; EIF2AK2; BAK1; BIRC4; GRK6; MAPK1; CAPNS1; PLK1; AKT2; IKBKB; CAPN2; CDK8; FAS; NFKB2; BCL2; MAP3K14; MAPK8; BCL2L1; CAPN1; MAPK3; CASP8; KRAS; RELA; PRKCD; PRKAA1; MAPK9; CDK2; PIM1; TP53; TNF; RAF1; IKBKG; RELB; CASP9; DYRK1A; MAP2K2; CHUK; APAF1; MAP2K1; NFKB1; PAK3; LMNA; CASP2; BIRC2; TTK; CSNK1A1; BRAF; BAX; PRKCA; SGK; CASP3; BIRC3; PARP1; in the case of diseases or disorders associated with or involving aberrant, pathologic, and/or abnormal leukocyte extravasation signaling in the brain, neurons, and/or CNS and/or diseases or disorders thereof: ACTN4; CD44; PRKCE; ITGAM; ROCK1; CXCR4; CYBA; RAC1; RAP1A; PRKCZ; ROCK2; RAC2; PTPN11; MMP14; PIK3CA; PRKCI; PTK2; PIK3CB; CXCL12; PIK3C3; MAPK8; PRKD1; ABL1; MAPK10; CYBB; MAPK13; RHOA; PRKCD; MAPK9; SRC; PIK3C2A; BTK; MAPK14; NOX1; PXN; VIL2; VASP; ITGB1; MAP2K2; CTNND1; PIK3R1; CTNNB1; CLDN1; CDC42; F11R; ITK; CRKL; VAV3; CTTN; PRKCA; MMP1; MMP9; in the case of diseases or disorders associated with or involving aberrant, pathologic, and/or abnormal integrin signaling in the brain, neurons, and/or CNS and/or diseases or disorders thereof: ACTN4; ITGAM; ROCK1; ITGA5; RAC1; PTEN; RAP1A; TLN1; ARHGEF7; MAPK1; RAC2; CAPNS1; AKT2; CAPN2; PIK3CA; PTK2; PIK3CB; PIK3C3; MAPK8; CAV1; CAPN1; ABL1; MAPK3; ITGA1; KRAS; RHOA; SRC; PIK3C2A; ITGB7; PPP1CC; ILK; PXN; VASP; RAF1; FYN; ITGB1; MAP2K2; PAK4; AKT1; PIK3R1; TNK2; MAP2K1; PAK3; ITGB3; CDC42; RND3; ITGA2; CRKL; BRAF; GSK3B; AKT3; in the case of diseases or disorders associated with or involving aberrant, pathologic, and/or abnormal acute phase response signaling in the brain, neurons, and/or CNS and/or diseases or disorders thereof: IRAK1; SOD2; MYD88; TRAF6; ELK1; MAPK1; PTPN11; AKT2; IKBKB; PIK3CA; FOS; NFKB2; MAP3K14; PIK3CB; MAPK8; RIPK1; MAPK3; IL6ST; KRAS; MAPK13; IL6R; RELA; SOCS1; MAPK9; FTL; NR3C1; TRAF2; SERPINE1; MAPK14; TNF; RAF1; PDK1; IKBKG; RELB; MAP3K7; MAP2K2; AKT1; JAK2; PIK3R1; CHUK; STAT3; MAP2K1; NFKB1; FRAP1; CEBPB; JUN; AKT3; ILIR1; IL6; in the case of diseases or disorders associated with or involving aberrant, pathologic, and/or abnormal PTEN signaling in the brain, neurons, and/or CNS and/or diseases or disorders thereof: ITGAM; ITGA5; RAC1; PTEN; PRKCZ; BCL2L11; MAPK1; RAC2; AKT2; EGFR; IKBKB; CBL; PIK3CA; CDKN1B; PTK2; NFKB2; BCL2; PIK3CB; BCL2L1; MAPK3; ITGA1; KRAS; ITGB7; ILK; PDGFRB; INSR; RAF1; IKBKG; CASP9; CDKN1A; ITGB1; MAP2K2; AKT1; PIK3R1; CHUK; PDGFRA; PDPK1; MAP2K1; NFKB1; ITGB3; CDC42; CCND1; GSK3A; ITGA2; GSK3B; AKT3; FOXO1; CASP3; RPS6KB1; in the case of diseases or disorders associated with or involving aberrant, pathologic, and/or abnormal p53 signaling in the brain, neurons, and/or CNS and/or diseases or disorders thereof: PTEN; EP300; BBC3; PCAF; FASN; BRCA1; GADD45A; BIRC5; AKT2; PIK3CA; CHEK1; TP53INP1; BCL2; PIK3CB; PIK3C3; MAPK8; THBS1; ATR; BCL2L1; E2F1; PMAIP1; CHEK2; TNFRSF10B; TP73; RB1; HDAC9; CDK2; PIK3C2A; MAPK14; TP53; LRDD; CDKN1A; HIPK2; AKT1; PIK3R1; RRM2B; APAF1; CTNNB1; SIRT1; CCND1; PRKDC; ATM; SFN; CDKN2A; JUN; SNAI2; GSK3B; BAX; AKT3; in the case of diseases or disorders associated with or involving aberrant, pathologic, and/or abnormal aryl hydrocarbon receptor signaling in the brain, neurons, and/or CNS and/or diseases or disorders thereof: HSPB1; EP300; FASN; TGM2; RXRA; MAPK1; NQO1; NCOR2; SP1; ARNT; CDKN1B; FOS; CHEK1; SMARCA4; NFKB2; MAPK8; ALDH1A1; ATR; E2F1; MAPK3; NRIP1; CHEK2; RELA; TP73; GSTP1; RB1; SRC; CDK2; AHR; NFE2L2; NCOA3; TP53; TNF; CDKN1A; NCOA2; APAF1; NFKB1; CCND1; ATM; ESR1; CDKN2A; MYC; JUN; ESR2; BAX; IL6; CYP1B1; HSP90AA1; in the case of diseases or disorders associated with or involving aberrant, pathologic, and/or abnormal xenobiotic metabolism signaling in the brain, neurons, and/or CNS and/or diseases or disorders thereof: PRKCE; EP300; PRKCZ; RXRA; MAPK1; NQO1; NCOR2; PIK3CA; ARNT; PRKCI; NFKB2; CAMK2A; PIK3CB; PPP2R1A; PIK3C3; MAPK8; PRKD1; ALDH1AI; MAPK3; NRIP1; KRAS; MAPK13; PRKCD; GSTP1; MAPK9; NOS2A; ABCB1; AHR; PPP2CA; FTL; NFE2L2; PIK3C2A; PPARGC1A; MAPK14; TNF; RAF1; CREBBP; MAP2K2; PIK3R1; PPP2R5C; MAP2K1; NFKB1; KEAP1; PRKCA; EIF2AK3; IL6; CYP1B1; HSP90AA1; in the case of diseases or disorders associated with or involving aberrant, pathologic, and/or abnormal SAPK/JNK signaling in the brain, neurons, and/or CNS and/or diseases or disorders thereof: PRKCE; IRAK1; PRKAA2; EIF2AK2; RAC1; ELK1; GRK6; MAPK1; GADD45A; RAC2; PLK1; AKT2; PIK3CA; FADD; CDK8; PIK3CB; PIK3C3; MAPK8; RIPK1; GNB2L1; IRS1; MAPK3; MAPK10; DAXX; KRAS; PRKCD; PRKAA1; MAPK9; CDK2; PIM1; PIK3C2A; TRAF2; TP53; LCK; MAP3K7; DYRK1A; MAP2K2; PIK3R1; MAP2K1; PAK3; CDC42; JUN; TTK; CSNK1A1; CRKL; BRAF; SGK; in the case of diseases or disorders associated with or involving aberrant, pathologic, and/or abnormal PPAr/RXR signaling in the brain, neurons, and/or CNS and/or diseases or disorders thereof: PRKAA2; EP300; INS; SMAD2; TRAF6; PPARA; FASN; RXRA; MAPK1; SMAD3; GNAS; IKBKB; NCOR2; ABCA1; GNAQ; NFKB2; MAP3K14; STAT5B; MAPK8; IRS1; MAPK3; KRAS; RELA; PRKAA1; PPARGC1A; NCOA3; MAPK14; INSR; RAF1; IKBKG; RELB; MAP3K7; CREBBP; MAP2K2; JAK2; CHUK; MAP2K1; NFKB1; TGFBR1; SMAD4; JUN; IL1R1; PRKCA; IL6; HSP90AA1; ADIPOQ; in the case of diseases or disorders associated with or involving aberrant, pathologic, and/or abnormal NF-kappaB signaling in the brain, neurons, and/or CNS and/or diseases or disorders thereof: IRAK1; EIF2AK2; EP300; INS; MYD88; PRKCZ; TRAF6; TBK1; AKT2; EGFR; IKBKB; PIK3CA; BTRC; NFKB2; MAP3K14; PIK3CB; PIK3C3; MAPK8; RIPK1; HDAC2; KRAS; RELA; PIK3C2A; TRAF2; TLR4; PDGFRB; TNF; INSR; LCK; IKBKG; RELB; MAP3K7; CREBBP; AKT1; PIK3R1; CHUK; PDGFRA; NFKB1; TLR2; BCL10; GSK3B; AKT3; TNFAIP3; IL1R1; in the case of diseases or disorders associated with or involving aberrant, pathologic, and/or abnormal neuregulin signaling in the brain, neurons, and/or CNS and/or diseases or disorders thereof: ERBB4; PRKCE; ITGAM; ITGA5; PTEN; PRKCZ; ELK1; MAPK1; PTPN11; AKT2; EGFR; ERBB2; PRKCI; CDKN1B; STAT5B; PRKD1; MAPK3; ITGA1; KRAS; PRKCD; STAT5A; SRC; ITGB7; RAF1; ITGB1; MAP2K2; ADAM17; AKT1; PIK3R1; PDPK1; MAP2K1; ITGB3; EREG; FRAP1; PSEN1; ITGA2; MYC; NRG1; CRKL; AKT3; PRKCA; HSP90AA1; RPS6KB1; in the case of diseases or disorders associated with or involving aberrant, pathologic, and/or abnormal wnt and beta catenin signaling in the brain, neurons, and/or CNS and/or diseases or disorders thereof: CD44; EP300; LRP6; DVL3; CSNK1E; GJA1; SMO; AKT2; PIN1; CDH1; BTRC; GNAQ; MARK2; PPP2R1A; WNT11; SRC; DKK1; PPP2CA; SOX6; SFRP2; ILK; LEF1; SOX9; TP53; MAP3K7; CREBBP; TCF7L2; AKT1; PPP2R5C; WNT5A; LRP5; CTNNB1; TGFBR1; CCND1; GSK3A; DVL1; APC; CDKN2A; MYC; CSNK1A1; GSK3B; AKT3; SOX2; in the case of diseases or disorders associated with or involving aberrant, pathologic, and/or abnormal insulin receptor signaling in the brain, neurons, and/or CNS and/or diseases or disorders thereof: PTEN; INS; EIF4E; PTPN1; PRKCZ; MAPK1; TSC1; PTPN11; AKT2; CBL; PIK3CA; PRKCI; PIK3CB; PIK3C3; MAPK8; IRS1; MAPK3; TSC2; KRAS; EIF4EBP1; SLC2A4; PIK3C2A; PPP1CC; INSR; RAF1; FYN; MAP2K2; JAK1; AKT1; JAK2; PIK3R1; PDPK1; MAP2K1; GSK3A; FRAP1; CRKL; GSK3B; AKT3; FOXO1; SGK; RPS6KB1; in the case of diseases or disorders associated with or involving aberrant, pathologic, and/or abnormal IL-6 signaling in the brain, neurons, and/or CNS and/or diseases or disorders thereof: HSPB1; TRAF6; MAPKAPK2; ELK1; MAPK1; PTPN11; IKBKB; FOS; NFKB2; MAP3K14; MAPK8; MAPK3; MAPK10; IL6ST; KRAS; MAPK13; IL6R; RELA; SOCS1; MAPK9; ABCB1; TRAF2; MAPK14; TNF; RAF1; IKBKG; RELB; MAP3K7; MAP2K2; IL8; JAK2; CHUK; STAT3; MAP2K1; NFKB1; CEBPB; JUN; ILIR1; SRF; IL6; in the case of diseases or disorders associated with or involving aberrant, pathologic, and/or abnormal IGF-1 signaling in the brain, neurons, and/or CNS and/or diseases or disorders thereof: IGF1; PRKCZ; ELK1; MAPK1; PTPN11; NEDD4; AKT2; PIK3CA; PRKCI; PTK2; FOS; PIK3CB; PIK3C3; MAPK8; IGF1R; IRS1; MAPK3; IGFBP7; KRAS; PIK3C2A; YWHAZ; PXN; RAF1; CASP9; MAP2K2; AKT1; PIK3R1; PDPK1; MAP2K1; IGFBP2; SFN; JUN; CYR61; AKT3; FOXO1; SRF; CTGF; RPS6KB1; in the case of diseases or disorders associated with or involving aberrant, pathologic, and/or abnormal NRF2-mediated oxidative stress response pathway regulation or signaling in the brain, neurons, and/or CNS and/or diseases or disorders thereof: PRKCE; EP300; SOD2; PRKCZ; MAPK1; SQSTM1; NQO1; PIK3CA; PRKCI; FOS; PIK3CB; PIK3C3; MAPK8; PRKD1; MAPK3; KRAS; PRKCD; GSTP1; MAPK9; FTL; NFE2L2; PIK3C2A; MAPK14; RAF1; MAP3K7; CREBBP; MAP2K2; AKT1; PIK3R1; MAP2K1; PP1B; JUN; KEAP1; GSK3B; ATF4; PRKCA; EIF2AK3; HSP90AA1; PRDX1; in the case of diseases or disorders associated with or involving aberrant, pathologic, and/or abnormal PPAR (e.g. PPAR alpha, PPAR beta, PPAR delta, and/or PPAR gamma) regulation or signaling in the brain, neurons, and/or CNS and/or diseases or disorders thereof: EP300; INS; TRAF6; PPARA; RXRA; MAPK1; IKBKB; NCOR2; FOS; NFKB2; MAP3K14; STAT5B; MAPK3; NRIP1; KRAS; PPARG; RELA; STAT5A; TRAF2; PPARGC1A; PDGFRB; TNF; INSR; RAF1; IKBKG; RELB; MAP3K7; CREBBP; MAP2K2; CHUK; PDGFRA; MAP2K1; NFKB1; JUN; ILIR1; HSP90AA1; in the case of diseases or disorders associated with or involving aberrant, pathologic, and/or abnormal Fc Epsilon RI regulation or signaling in the brain, neurons, and/or CNS and/or diseases or disorders thereof: PRKCE; RAC1; PRKCZ; LYN; MAPK1; RAC2; PTPN11; AKT2; PIK3CA; SYK; PRKCI; PIK3CB; PIK3C3; MAPK8; PRKD1; MAPK3; MAPK10; KRAS; MAPK13; PRKCD; MAPK9; PIK3C2A; BTK; MAPK14; TNF; RAF1; FYN; MAP2K2; AKT1; PIK3R1; PDPK1; MAP2K1; AKT3; VAV3; PRKCA; in the case of diseases or disorders associated with or involving aberrant, pathologic, and/or abnormal G-protein coupled receptor regulation or signaling in the brain, neurons, and/or CNS and/or diseases or disorders thereof: PRKCE; RAP1A; RGS16; MAPK1; GNAS; AKT2; IKBKB; PIK3CA; CREB1; GNAQ; NFKB2; CAMK2A; PIK3CB; PIK3C3; MAPK3; KRAS; RELA; SRC; PIK3C2A; RAF1; IKBKG; RELB; FYN; MAP2K2; AKT1; PIK3R1; CHUK; PDPK1; STAT3; MAP2K1; NFKB1; BRAF; ATF4; AKT3; PRKCA; in the case of diseases or disorders associated with or involving aberrant, pathologic, and/or abnormal inositol phosphate metabolism regulation or signaling in the brain, neurons, and/or CNS and/or diseases or disorders thereof: PRKCE; IRAK1; PRKAA2; EIF2AK2; PTEN; GRK6; MAPK1; PLK1; AKT2; PIK3CA; CDK8; PIK3CB; PIK3C3; MAPK8; MAPK3; PRKCD; PRKAA1; MAPK9; CDK2; PIM1; PIK3C2A; DYRK1A; MAP2K2; PIP5K1A; PIK3R1; MAP2K1; PAK3; ATM; TTK; CSNK1A1; BRAF; SGK; in the case of diseases or disorders associated with or involving aberrant, pathologic, and/or abnormal PDGF regulation or signaling in the brain, neurons, and/or CNS and/or diseases or disorders thereof: EIF2AK2; ELK1; ABL2; MAPK1; PIK3CA; FOS; PIK3CB; PIK3C3; MAPK8; CAV1; ABL1; MAPK3; KRAS; SRC; PIK3C2A; PDGFRB; RAF1; MAP2K2; JAK1; JAK2; PIK3R1; PDGFRA; STAT3; SPHK1; MAP2K1; MYC; JUN; CRKL; PRKCA; SRF; STAT1; SPHK2; in the case of diseases or disorders associated with involving aberrant, pathologic, and/or abnormal VEGF regulation or signaling in the brain, neurons, and/or CNS and/or diseases or disorders thereof: ACTN4; ROCK1; KDR; FLT1; ROCK2; MAPK1; PGF; AKT2; PIK3CA; ARNT; PTK2; BCL2; PIK3CB; PIK3C3; BCL2L1; MAPK3; KRAS; HIF1A; NOS3; PIK3C2A; PXN; RAF1; MAP2K2; ELAVL1; AKT1; PIK3R1; MAP2K1; SFN; VEGFA; AKT3; FOXO1; PRKCA; in the case of diseases or disorders associated with or involving aberrant, pathologic, and/or abnormal natural killer cell regulation or signaling in the brain, neurons, and/or CNS and/or diseases or disorders thereof: PRKCE; RAC1; PRKCZ; MAPK1; RAC2; PTPN11; KIR2DL3; AKT2; PIK3CA; SYK; PRKCI; PIK3CB; PIK3C3; PRKD1; MAPK3; KRAS; PRKCD; PTPN6; PIK3C2A; LCK; RAF1; FYN; MAP2K2; PAK4; AKT1; PIK3R1; MAP2K1; PAK3; AKT3; VAV3; PRKCA; in the case of diseases or disorders associated with or involving aberrant, pathologic, and/or abnormal cell cycle G1/S checkpoint regulation or signaling in the brain, neurons, and/or CNS and/or diseases or disorders thereof: HDAC4; SMAD3; SUV39H1; HDAC5; CDKN1B; BTRC; ATR; ABL1; E2F1; HDAC2; HDAC7A; RB1; HDAC11; HDAC9; CDK2; E2F2; HDAC3; TP53; CDKN1A; CCND1; E2F4; ATM; RBL2; SMAD4; CDKN2A; MYC; NRG1; GSK3B; RBL1; HDAC6; in the case of diseases or disorders associated with or involving aberrant, pathologic, and/or abnormal T-cell receptor regulation or signaling in the brain, neurons, and/or CNS and/or diseases or disorders thereof: RAC1; ELK1; MAPK1; IKBKB; CBL; PIK3CA; FOS; NFKB2; PIK3CB; PIK3C3; MAPK8; MAPK3; KRAS; RELA; PIK3C2A; BTK; LCK; RAF1; IKBKG; RELB; FYN; MAP2K2; PIK3R1; CHUK; MAP2K1; NFKB1; ITK; BCL10; JUN; VAV3; in the case of diseases or disorders associated with or involving aberrant, pathologic, and/or abnormal death receptor regulation or signaling in the brain, neurons, and/or CNS and/or diseases or disorders thereof: CRADD; HSPB1; BID; BIRC4; TBK1; IKBKB; FADD; FAS; NFKB2; BCL2; MAP3K14; MAPK8; RIPK1; CASP8; DAXX; TNFRSF10B; RELA; TRAF2; TNF; IKBKG; RELB; CASP9; CHUK; APAF1; NFKB1; CASP2; BIRC2; CASP3; BIRC3; in the case of diseases or disorders associated with or involving aberrant, pathologic, and/or FGF regulation or signaling in the brain, neurons, and/or CNS and/or diseases or disorders thereof: RAC1; FGFR1; MET; MAPKAPK2; MAPK1; PTPN11; AKT2; PIK3CA; CREB1; PIK3CB; PIK3C3; MAPK8; MAPK3; MAPK13; PTPN6; PIK3C2A; MAPK14; RAF1; AKT1; PIK3R1; STAT3; MAP2K1; FGFR4; CRKL; ATF4; AK3; PRKCA; HGF; in the case of diseases or disorders associated with or involving aberrant, pathologic, and/or GM-CSF regulation or signaling in the brain, neurons, and/or CNS and/or diseases or disorders thereof: LYN; ELK1; MAPK1; PTPN11; AKT2; PIK3CA; CAMK2A; STAT5B; PIK3CB; PIK3C3; GNB2L1; BCL2L1; MAPK3; ETS1; KRAS; RUNX1; PIM1; PIK3C2A; RAF1; MAP2K2; AKT1; JAK2; PIK3R1; STAT3; MAP2K1; CCND1; AK3; STAT1; in the case of diseases or disorders associated with or involving aberrant, pathologic, and/or amyotrophic lateral sclerosis regulation or signaling in the brain, neurons, and/or CNS and/or diseases or disorders thereof: BID; IGF1; RACI; BIRC4; PGF; CAPNS1; CAPN2; PIK3CA; BCL2; PIK3CB; PIK3C3; BCL2L1; CAPN1; PIK3C2A; TP53; CASP9; PIK3R1; RABSA; CASP1; APAF1; VEGFA; BIRC2; BAX; AKT3; CASP3; BIRC3; in the case of diseases or disorders associated with or involving aberrant, pathologic, and/or JAK/Stat regulation or signaling in the brain, neurons, and/or CNS and/or diseases or disorders thereof: PTPN1; MAPK1; PTPN11; AKT2; PIK3CA; STAT5B; PIK3CB; PIK3C3; MAPK3; KRAS; SOCS1; STAT5A; PTPN6; PIK3C2A; RAF1; CDKN1A; MAP2K2; JAK1; AKT1; JAK2; PIK3R1; STAT3; MAP2K1; FRAP1; AKT3; STAT1; in the case of diseases or disorders associated with or involving aberrant, pathologic, and/or nicotinate and nicotinamide metabolism regulation or signaling in the brain, neurons, and/or CNS and/or diseases or disorders thereof: PRKCE; IRAK1; PRKAA2; EIF2AK2; GRK6; MAPK1; PLK1; AKT2; CDK8; MAPK8; MAPK3; PRKCD; PRKAA1; PBEF1; MAPK9; CDK2; PIM1; DYRK1A; MAP2K2; MAP2K1; PAK3; NT5E; TTK; CSNK1A1; BRAF; SGK; in the case of diseases or disorders associated with or involving aberrant, pathologic, and/or chemokine signaling regulation or signaling in the brain, neurons, and/or CNS and/or diseases or disorders thereof: CXCR4; ROCK2; MAPK1; PTK2; FOS; CFL1; GNAQ; CAMK2A; CXCL12; MAPK8; MAPK3; KRAS; MAPK13; RHOA; CCR3; SRC; PPP1CC; MAPK14; NOX1; RAF1; MAP2K2; MAP2K1; JUN; CCL2; PRKCA; in the case of diseases or disorders associated with or involving aberrant, pathologic, and/or IL-2 signaling regulation or signaling in the brain, neurons, and/or CNS and/or diseases or disorders thereof: ELK1; MAPK1; PTPN11; AKT2; PIK3CA; SYK; FOS; STAT5B; PIK3CB; PIK3C3; MAPK8; MAPK3; KRAS; SOCS1; STAT5A; PIK3C2A; LCK; RAFI; MAP2K2; JAK1; AKT1; PIK3R1; MAP2K1; JUN; AKT3; in the case of diseases or disorders associated with or involving synaptic long term depression in the brain, neurons, and/or CNS and/or diseases or disorders thereof: PRKCE; IGF1; PRKCZ; PRDX6; LYN; MAPK1; GNAS; PRKCI; GNAQ; PPP2R1A; IGF1R; PRKD1; MAPK3; KRAS; GRN; PRKCD; NOS3; NOS2A; PPP2CA; YWHAZ; RAF1; MAP2K2; PPP2R5C; MAP2K1; PRKCA; in the case of diseases or disorders associated with or involving aberrant, pathologic, and/or estrogen receptor regulation or signaling in the brain, neurons, and/or CNS and/or diseases or disorders thereof: TAF4B; EP300; CARM1; PCAF; MAPK1; NCOR2; SMARCA4; MAPK3; NRIP1; KRAS; SRC; NR3C1; HDAC3; PPARGC1A; RBM9; NCOA3; RAF1; CREBBP; MAP2K2; NCOA2; MAP2K1; PRKDC; ESR1; ESR2; in the case of diseases or disorders associated with or involving aberrant, pathologic, and/or protein ubiquitination pathway activity, regulation, and/or signaling in the brain, neurons, and/or CNS and/or diseases or disorders thereof: TRAF6; SMURF1; BIRC4; BRCA1; UCHL1; NEDD4; CBL; UBE2I; BTRC; HSPA5; USP7; USP10; FBXW7; USP9X; STUB1; USP22; B2M; BIRC2; PARK2; USP8; USP1; VHL; HSP90AA1; BIRC3; in the case of diseases or disorders associated with or involving aberrant, pathologic, and/or IL-10 regulation or signaling in the brain, neurons, and/or CNS and/or diseases or disorders thereof: TRAF6; CCR1; ELK1; IKBKB; SP1; FOS; NFKB2; MAP3K14; MAPK8; MAPK13; RELA; MAPK14; TNF; IKBKG; RELB; MAP3K7; JAK1; CHUK; STAT3; NFKB1; JUN; IL1R1; IL6; in the case of diseases or disorders associated with or involving aberrant, pathologic, and/or Vitamin D receptor (VDR) and/or RXR regulation or signaling in the brain, neurons, and/or CNS and/or diseases or disorders thereof: PRKCE; EP300; PRKCZ; RXRA; GADD45A; HES1; NCOR2; SP1; PRKCI; CDKN1B; PRKD1; PRKCD; RUNX2; KLF4; YY1; NCOA3; CDKN1A; NCOA2; SPP1; LRP5; CEBPB; FOXO1; PRKCA; in the case of diseases or disorders associated with or involving aberrant, pathologic, and/or TGF-beta regulation or signaling in the brain, neurons, and/or CNS and/or diseases or disorders thereof: EP300; SMAD2; SMURF1; MAPK1; SMAD3; SMAD1; FOS; MAPK8; MAPK3; KRAS; MAPK9; RUNX2; SERPINE1; RAF1; MAP3K7; CREBBP; MAP2K2; MAP2K1; TGFBR1; SMAD4; JUN; SMAD5; in the case of diseases or disorders associated with or involving aberrant, pathologic, and/or Toll-like Receptor activity, regulation, and/or signaling in the brain, neurons, and/or CNS and/or diseases or disorders thereof: IRAK1; EIF2AK2; MYD88; TRAF6; PPARA; ELK1; IKBKB; FOS; NFKB2; MAP3K14; MAPK8; MAPK13; RELA; TLR4; MAPK14; IKBKG; RELB; MAP3K7; CHUK; NFKB1; TLR2; JUN; in the case of diseases or disorders associated with or involving aberrant, pathologic, and/or p38 MAPK activity, regulation, and/or signaling in the brain, neurons, and/or CNS and/or diseases or disorders thereof: HSPB1; IRAK1; TRAF6; MAPKAPK2; ELK1; FADD; FAS; CREB1; DDIT3; RPS6KA4; DAXX; MAPK13; TRAF2; MAPK14; TNF; MAP3K7; TGFBR1; MYC; ATF4; IL1R1; SRF; STAT1; in the case of diseases or disorders associated with or involving aberrant, pathologic, and/or neurotrophin/TRK activity, regulation, and/or signaling in the brain, neurons, and/or CNS and/or diseases or disorders thereof: NTRK2; MAPK1; PTPN11; PIK3CA; CREB1; FOS; PIK3CB; PIK3C3; MAPK8; MAPK3; KRAS; PIK3C2A; RAF1; MAP2K2; AKT1; PIK3R1; PDPK1; MAP2K1; CDC42; JUN; ATF4; in the case of diseases or disorders associated with or involving aberrant, pathologic, and/or FXR and/or RXR activity, regulation, and/or signaling in the brain, neurons, and/or CNS and/or diseases or disorders thereof: INS; PPARA; FASN; RXRA; AKT2; SDC1; MAPK8; APOB; MAPK10; PPARG; MTTP; MAPK9; PPARGC1A; TNF; CREBBP; AKT1; SREBF1; FGFR4; AKT3; FOXO1; in the case of diseases or disorders associated with or involving aberrant, pathologic, and/or synaptic long term potentiation in the brain, neurons, and/or CNS and/or diseases or disorders thereof: PRKCE; RAP1A; EP300; PRKCZ; MAPK1; CREB1; PRKCI; GNAQ; CAMK2A; PRKD1; MAPK3; KRAS; PRKCD; PPP1CC; RAF1; CREBBP; MAP2K2; MAP2K1; ATF4; PRKCA; in the case of diseases or disorders associated with or involving aberrant, pathologic, and/or calcium regulation and/or signaling in the brain, neurons, and/or CNS and/or diseases or disorders thereof: RAP1A; EP300; HDAC4; MAPK1; HDAC5; CREB1; CAMK2A; MYH9; MAPK3; HDAC2; HDAC7A; HDAC11; HDAC9; HDAC3; CREBBP; CALR; CAMKK2; ATF4; HDAC6; in the case of diseases or disorders associated with or involving aberrant, pathologic, and/or EGF or EGFR regulation and/or signaling in the brain, neurons, and/or CNS and/or diseases or disorders thereof: ELK1; MAPK1; EGFR; PIK3CA; FOS; PIK3CB; PIK3C3; MAPK8; MAPK3; PIK3C2A; RAF1; JAK1; PIK3R1; STAT3; MAP2K1; JUN; PRKCA; SRF; STAT1; in the case of diseases or disorders associated with or involving aberrant, pathologic, and/or LPS/IL-1 mediated inhibition of RXR function, regulation and/or signaling in the brain, neurons, and/or CNS and/or diseases or disorders thereof: IRAK1; MYD88; TRAF6; PPARA; RXRA; ABCA1; MAPK8; ALDH1A1; GSTP1; MAPK9; ABCB1; TRAF2; TLR4; TNF; MAP3K7; NR1H2; SREBF1; JUN; IL1R1; in the case of diseases or disorders associated with or involving aberrant, pathologic, and/or LXR/RXR function, regulation and/or signaling in the brain, neurons, and/or CNS and/or diseases or disorders thereof: FASN; RXRA; NCOR2; ABCA1; NFKB2; IRF3; RELA; NOS2A; TLR4; TNF; RELB; LDLR; NR1H2; NFKB1; SREBF1; IL1R1; CCL2; IL6; MMP9; in the case of diseases or disorders associated with or involving aberrant, pathologic, and/or amyloid processing in the brain, neurons, and/or CNS and/or diseases or disorders thereof: PRKCE; CSNK1E; MAPK1; CAPNS1; AKT2; CAPN2; CAPN1; MAPK3; MAPK13; MAPT; MAPK14; AKT1; PSEN1; CSNK1A1; GSK3B; AKT3; APP; in the case of diseases or disorders associated with or involving aberrant, pathologic, and/or abnormal IL-4 activity, signaling, and/or regulation in the brain, neurons, and/or CNS and/or diseases or disorders thereof: AKT2; PIK3CA; PIK3CB; PIK3C3; IRS1; KRAS; SOCS1; PTPN6; NR3C1; PIK3C2A; JAK1; AKT1; JAK2; PIK3R1; FRAP1; AKT3; RPS6KB1; in the case of diseases or disorders associated with or involving aberrant, pathologic, and/or abnormal cell cycle: G2/M DNA damage checkpoint regulation activity, signaling, and/or regulation in the brain, neurons, and/or CNS and/or diseases or disorders thereof: EP300; PCAF; BRCA1; GADD45A; PLK1; BTRC; CHEK1; ATR; CHEK2; YWHAZ; TP53; CDKN1A; PRKDC; ATM; SFN; CDKN2A; in the case of diseases or disorders associated with or involving aberrant, pathologic, and/or abnormal purine metabolism signaling thereof, and/or regulation thereof in the brain, neurons, and/or CNS and/or diseases or disorders thereof: NME2; SMARCA4; MYH9; RRM2; ADAR; EIF2AK4; PKM2; ENTPD1; RAD51; RRM2B; TJP2; RAD51C; NT5E; POLD1; NME1; in the case of diseases or disorders associated with or involving aberrant, pathologic, and/or abnormal cAMP-mediated signaling and/or regulation in the brain, neurons, and/or CNS and/or diseases or disorders thereof: RAP1A; MAPK1; GNAS; CREB1; CAMK2A; MAPK3; SRC; RAF1; MAP2K2; STAT3; MAP2K1; BRAF; ATF4; in the case of diseases or disorders associated with or involving aberrant, pathologic, and/or abnormal mitochondrial function in the brain, neurons, and/or CNS and/or diseases or disorders thereof: SOD2; MAPK8; CASP8; MAPK10; MAPK9; CASP9; PARK7; PSEN1; PARK2; APP; CASP3; AIF; CytC; SMAC (Diablo); Aifm-1; Aifm-2; in the case of diseases or disorders associated with or involving aberrant, pathologic, and/or abnormal notch signaling and/or regulation in the brain, neurons, and/or CNS and/or diseases or disorders thereof: HES1; JAG1; NUMB; NOTCH4; ADAM17; NOTCH2; PSEN1; NOTCH3; NOTCH1; DLL4; in the case of diseases or disorders associated with or involving aberrant, pathologic, and/or abnormal endoplasmic reticulum stress pathway activity, signaling, and/or regulation in the brain, neurons, and/or CNS and/or diseases or disorders thereof: HSPA5; MAPK8; XBP1; TRAF2; ATF6; CASP9; ATF4; EIF2AK3; CASP3; in the case of diseases or disorders associated with or involving aberrant, pathologic, and/or abnormal pyrimidine metabolism, signaling thereof, and/or regulation thereof in the brain, neurons, and/or CNS and/or diseases or disorders thereof: NME2; AICDA; RRM2; EIF2AK4; ENTPD1; RRM2B; NT5E; POLD1; NME1; in the case of diseases or disorders associated with or involving aberrant, pathologic, and/or abnormal Parkinson's signaling in the brain, neurons, and/or CNS and/or diseases or disorders thereof: UCHL1; MAPK8; MAPK13; MAPK14; CASP9; PARK7; PARK2; CASP3; in the case of diseases or disorders associated with or involving aberrant, pathologic, and/or abnormal Glycolysis/Gluconeogenesis activity, signaling, and/or regulation in the brain, neurons, and/or CNS and/or diseases or disorders thereof: HK2; GCK; GPI; ALDH1A1; PKM2; LDHA; HK1; in the case of diseases or disorders associated with or involving aberrant, pathologic, and/or abnormal interferon activity, signaling, and/or regulation in the brain, neurons, and/or CNS and/or diseases or disorders thereof: IRF1; SOCS1; JAK1; JAK2; IFITM1; STAT1; IFIT3; in the case of diseases or disorders associated with or involving aberrant, pathologic, and/or abnormal sonic the hedgehog activity, signaling, and/or regulation in the brain, neurons, and/or CNS and/or diseases or disorders thereof: ARRB2; SMO; GLI2; DYRK1A; GLI1; GSK3B; DYRK1B; in the case of diseases or disorders associated with or involving aberrant, pathologic, and/or abnormal glycerophospholipid metabolism, signaling thereof, and/or regulation thereof in the brain, neurons, and/or CNS and/or diseases or disorders thereof: PLD1; GRN; GPAM; YWHAZ; SPHK1; SPHK2; in the case of diseases or disorders associated with or involving aberrant, pathologic, and/or abnormal phospholipid degradation, signaling thereof, and/or regulation thereof in the brain, neurons, and/or CNS and/or diseases or disorders thereof: PRDX6; PLD1; GRN; YWHAZ; SPHK1; SPHK2; in the case of diseases or disorders associated with or involving aberrant, pathologic, and/or abnormal tryptophan metabolism, signaling thereof, and/or regulation thereof in the brain, neurons, and/or CNS and/or diseases or disorders thereof: SIAH2; PRMT5; NEDD4; ALDH1A1; CYPIB1; SIAH1; in the case of diseases or disorders associated with or involving aberrant, pathologic, and/or abnormal lysine degradation, signaling thereof, and/or regulation thereof in the brain, neurons, and/or CNS and/or diseases or disorders thereof: SUV39H1; EHMT2; NSD1; SETD7; PPP2R5C; in the case of diseases or disorders associated with or involving aberrant, pathologic, and/or abnormal nucleotide excision repair pathway activity, signaling thereof, and/or regulation thereof in the brain, neurons, and/or CNS and/or diseases or disorders thereof: ERCC5; ERCC4; XPA; XPC; ERCC1; in the case of diseases or disorders associated with or involving aberrant, pathologic, and/or abnormal nucleotide starch and sucrose metabolism, signaling thereof, and/or regulation thereof in the brain, neurons, and/or CNS and/or diseases or disorders thereof: UCHL1; HK2; GCK; GPI; HK1; in the case of diseases or disorders associated with or involving aberrant, pathologic, and/or abnormal aminosugars metabolism, signaling thereof, and/or regulation thereof in the brain, neurons, and/or CNS and/or diseases or disorders thereof: NQO1; HK2; GCK; HK1; in the case of diseases or disorders associated with or involving aberrant, pathologic, and/or abnormal arachidonic acid metabolism, signaling thereof, and/or regulation thereof in the brain, neurons, and/or CNS and/or diseases or disorders thereof: PRDX6; GRN; YWHAZ; CYP1B1; in the case of diseases or disorders associated with or involving aberrant, pathologic, and/or abnormal circadian rhythm signaling and/or regulation in the brain, neurons, and/or CNS and/or diseases or disorders thereof: CSNK1E; CREB1; ATF4; NR1D1; in the case of diseases or disorders associated with or involving aberrant, pathologic, and/or coagulation system activity signaling and/or regulation in the brain, neurons, and/or CNS and/or diseases or disorders thereof: BDKRB1; F2R; SERPINE1; F3; a PAR (e.g. PAR1, PAR2, etc.) PLC, aPC; in the case of diseases or disorders associated with or involving aberrant, pathologic, and/or abnormal dopamine receptor signaling and/or regulation in the brain, neurons, and/or CNS and/or diseases or disorders thereof: PPP2R1A; PPP2CA; PPP1CC; PPP2R5C; in the case of diseases or disorders associated with or involving aberrant, pathologic, and/or abnormal Glutathione Metabolism signaling and/or regulation in the brain, neurons, and/or CNS and/or diseases or disorders thereof: IDH2; GSTP1; ANPEP; IDH1; in the case of diseases or disorders associated with or involving aberrant, pathologic, and/or abnormal Glycerolipid Metabolism signaling and/or regulation in the brain, neurons, and/or CNS and/or diseases or disorders thereof: ALDH1A1; GPAM; SPHK1; SPHK2; in the case of diseases or disorders associated with or involving aberrant, pathologic, and/or abnormal Linoleic Acid Metabolism signaling and/or regulation in the brain, neurons, and/or CNS and/or diseases or disorders thereof: PRDX6; GRN; YWHAZ; CYP1B1; in the case of diseases or disorders associated with or involving aberrant, pathologic, and/or abnormal Methionine Metabolism signaling and/or regulation in the brain, neurons, and/or CNS and/or diseases or disorders thereof: DNMT1; DNMT3B; AHCY; DNMT3A; in the case of diseases or disorders associated with or involving aberrant, pathologic, and/or abnormal Pyruvate Metabolism signaling and/or regulation in the brain, neurons, and/or CNS and/or diseases or disorders thereof: GLO1; ALDH1A1; PKM2; LDHA; in the case of diseases or disorders associated with or involving aberrant, pathologic, and/or abnormal Arginine and Proline Metabolism signaling and/or regulation in the brain, neurons, and/or CNS and/or diseases or disorders thereof: ALDH1A1; NOS3; NOS2A; in the case of diseases or disorders associated with or involving aberrant, pathologic, and/or abnormal Eicosanoid signaling and/or regulation in the brain, neurons, and/or CNS and/or diseases or disorders thereof: PRDX6; GRN; YWHAZ; in the case of diseases or disorders associated with or involving aberrant, pathologic, and/or abnormal fructose and mannose metabolism signaling and/or regulation in the brain, neurons, and/or CNS and/or diseases or disorders thereof: HK2; GCK; HK1; in the case of diseases or disorders associated with or involving aberrant, pathologic, and/or abnormal antigen presentation pathway activity, signaling and/or regulation in the brain, neurons, and/or CNS and/or diseases or disorders thereof: CALR; B2M; in the case of diseases or disorders associated with or involving aberrant, pathologic, and/or abnormal steroid biosynthesis in the brain, neurons, and/or CNS and/or diseases or disorders thereof: NQO1; DHCR7; in the case of diseases or disorders associated with or involving aberrant, pathologic, and/or abnormal butanoate metabolism in the brain, neurons, and/or CNS and/or diseases or disorders thereof: ALDH1A1; NLGN1; in the case of diseases or disorders associated with or involving an aberrant, pathologic, and/or abnormal citrate cycle in the brain, neurons, and/or CNS and/or diseases or disorders thereof: IDH2; IDH1; in the case of diseases or disorders associated with or involving aberrant, pathologic, and/or abnormal fatty acid metabolism in the brain, neurons, and/or CNS and/or diseases or disorders thereof: ALDH1A1; CYP1B1; in the case of diseases or disorders associated with or involving aberrant, pathologic, and/or abnormal Glycerophospholipid metabolism in the brain, neurons, and/or CNS and/or diseases or disorders thereof: PRDX6; CHKA; in the case of diseases or disorders associated with or involving aberrant, pathologic, and/or abnormal histidine metabolism in the brain, neurons, and/or CNS and/or diseases or disorders thereof: PRMT5; ALDH1A1; in the case of diseases or disorders associated with or involving aberrant, pathologic, and/or abnormal inositol metabolism in the brain, neurons, and/or CNS and/or diseases or disorders thereof: ERO1L; APEX1; in the case of diseases or disorders associated with or involving aberrant, pathologic, and/or abnormal Phenylalanine metabolism in the brain, neurons, and/or CNS and/or diseases or disorders thereof: PRDX6; PRDX1; in the case of diseases or disorders associated with or involving aberrant, pathologic, and/or abnormal Seleno amino acid metabolism in the brain, neurons, and/or CNS and/or diseases or disorders thereof: PRMT5; AHCY; in the case of diseases or disorders associated with or involving aberrant, pathologic, and/or abnormal Sphingolipid metabolism in the brain, neurons, and/or CNS and/or diseases or disorders thereof: SPHK1; SPHK2; in the case of diseases or disorders associated with or involving aberrant, pathologic, and/or abnormal Aminophosphonate metabolism in the brain, neurons, and/or CNS and/or diseases or disorders thereof: PRMT5; in the case of diseases or disorders associated with or involving aberrant, pathologic, and/or abnormal androgen and/or estrogen metabolism in the brain, neurons, and/or CNS and/or diseases or disorders thereof: PRMT5; in the case of diseases or disorders associated with or involving aberrant, pathologic, and/or abnormal Ascorbate and Aldarate metabolism in the brain, neurons, and/or CNS and/or diseases or disorders thereof: ALDH1A1; in the case of diseases or disorders associated with or involving aberrant, pathologic, and/or abnormal Cysteine Metabolism in the brain, neurons, and/or CNS and/or diseases or disorders thereof: LDHA; in the case of diseases or disorders associated with or involving aberrant, pathologic, and/or abnormal fatty acid biosynthesis in the brain, neurons, and/or CNS and/or diseases or disorders thereof: FASN; in the case of diseases or disorders associated with or involving aberrant, pathologic, and/or abnormal glutamate receptor signaling in the brain, neurons, and/or CNS and/or diseases or disorders thereof: GNB2L1; in the case of diseases or disorders associated with or involving aberrant, pathologic, and/or abnormal Pentose Phosphate pathway in the brain, neurons, and/or CNS and/or diseases or disorders thereof: GPI; in the case of diseases or disorders associated with or involving aberrant, pathologic, and/or abnormal retinol metabolism in the brain, neurons, and/or CNS and/or diseases or disorders thereof: ALDH1A1; in the case of diseases or disorders associated with or involving aberrant, pathologic, and/or abnormal Pentose and Glucuronate interconversions in the brain, neurons, and/or CNS and/or diseases or disorders thereof: UCHL1; in the case of diseases or disorders associated with or involving aberrant, pathologic, and/or abnormal Riboflavin Metabolism in the brain, neurons, and/or CNS and/or diseases or disorders thereof: TYR; in the case of diseases or disorders associated with or involving aberrant, pathologic, and/or abnormal Tyrosine Metabolism in the brain, neurons, and/or CNS and/or diseases or disorders thereof: PRMT5, TYR; in the case of diseases or disorders associated with or involving aberrant, pathologic, and/or abnormal Ubiquinone biosynthesis in the brain, neurons, and/or CNS and/or diseases or disorders thereof: PRMT5; in the case of diseases or disorders associated with or involving aberrant, pathologic, and/or abnormal Valine, leucine and isoleucine degradation in the brain, neurons, and/or CNS and/or diseases or disorders thereof: ALDH1A1; in the case of diseases or disorders associated with or involving aberrant, pathologic, and/or abnormal glycine, serine, and threonine metabolism in the brain, neurons, and/or CNS and/or diseases or disorders thereof: CHKA; in the case of diseases or disorders associated with or involving aberrant, pathologic, and/or abnormal lysine degradation in the brain, neurons, and/or CNS and/or diseases or disorders thereof: ALDH1A1; in the case of diseases or disorders associated with or involving aberrant, pathologic, and/or abnormal pain or pain signaling or pain signal generation in the brain, neurons, and/or CNS and/or diseases or disorders thereof: TRPM7; TRPC5; TRPC6; TRPC1; Cnr1; cnr2; Grk2; Trpa1; Pomc; Cgrp; Crf; Pka; Era; Nr2b; TRPM5; Prkaca; Prkacb; Prkar1a; Prkar2a; in the case of diseases or disorders associated with or involving aberrant, pathologic, and/or abnormal brain, neuron, and/or CNS development and/or diseases or disorders thereof: BMP-4; Chordin (Chrd); Noggin (Nog); WNT (Wnt2; Wnt2b; Wnt3a; Wnt4; Wnt5a; Wnt6; Wnt7b; Wnt8b; Wnt9a; Wnt9b; Wnt10a; Wnt10b; Wnt16); beta-catenin; Dkk-1; Frizzled related proteins; Otx-2; Gbx2; FGF-8; Reelin; Dab1; unc-86 (Pou4f1 or Bm3a); Numb; Reln; in the case of diseases or disorders associated with or involving prion disorders of or in the brain, neuron, and/or CNS and/or diseases or disorders thereof: Prp; in the case of substance or activity additions involving activities of the brain, neuron, and/or CNS: Prkce (alcohol); Drd2; Drd4; ABAT (alcohol); GRIA2; Grm5; Grin1; Htr1b; Grin2a; Drd3; Pdyn; Gria1 (alcohol); in the case of diseases or disorders associated with or involving PI3K/AKT signaling and/or regulation thereof in the brain, neuron, and/or CNS and/or diseases or disorders thereof: PRKCE; ITGAM; ITGA5; IRAK1; PRKAA2; EIF2AK2; PTEN; EIF4E; PRKCZ; GRK6; MAPK1; TSC1; PLK1; AKT2; IKBKB; PIK3CA; CDK8; CDKN1B; NFKB2; BCL2; PIK3CB; PPP2R1A; MAPK8; BCL2L1; MAPK3; TSC2; ITGA1; KRAS; EIF4EBP1; RELA; PRKCD; NOS3; PRKAA1; MAPK9; CDK2; PPP2CA; PIM1; ITGB7; YWHAZ; ILK; TP53; RAF1; IKBKG; RELB; DYRK1A; CDKN1A; ITGB1; MAP2K2; JAK1; AKT1; JAK2; PIK3R1; CHUK; PDPK1; PPP2R5C; CTNNB1; MAP2K1; NFKB1; PAK3; ITGB3; CCND1; GSK3A; FRAP1; SFN; ITGA2; ITK; CSNK1A1; BRAF; GSK3B; AKT3; FOXO1; SGK; HSP90AA1; RPS6KB1; in the case of diseases or disorders associated with or involving ERK/MAPK signaling and/or regulation thereof in the brain, neuron, and/or CNS and/or diseases or disorders thereof: PRKCE; ITGAM; ITGA5; HSPB1; IRAK1; PRKAA2; EIF2AK2; RAC1; RAP1A; TLN1; EIF4E; ELK1; GRK6; MAPK1; RAC2; PLK1; AKT2; PIK3CA; CDK8; CREB1; PRKCI; PTK2; FOS; RPS6KA4; PIK3CB; PPP2R1A; PIK3C3; MAPK8; MAPK3; ITGA1; ETS1; KRAS; MYCN; EIF4EBP1; PPARG; PRKCD; PRKAA1; MAPK9; SRC; CDK2; PPP2CA; PIM1; PIK3C2A; ITGB7; YWHAZ; PPP1CC; KSR1; PXN; RAF1; FYN; DYRK1A; ITGB1; MAP2K2; PAK4; PIK3R1; STAT3; PPP2R5C; MAP2K1; PAK3; ITGB3; ESR1; ITGA2; MYC; TTK; CSNK1A1; CRKL; BRAF; ATF4; PRKCA; SRF; STAT1; SGK; in the case of diseases or disorders associated with or involving glucocorticoid receptor signaling and/or regulation thereof in the brain, neuron, and/or CNS and/or diseases or disorders thereof: RACI; TAF4B; EP300; SMAD2; TRAF6; PCAF; ELK1; MAPK1; SMAD3; AKT2; IKBKB; NCOR2; UBE2I; PIK3CA; CREB1; FOS; HSPA5; NFKB2; BCL2; MAP3K14; STAT5B; PIK3CB; PIK3C3; MAPK8; BCL2L1; MAPK3; TSC22D3; MAPK10; NRIP1; KRAS; MAPK13; RELA; STAT5A; MAPK9; NOS2A; PBX1; NR3C1; PIK3C2A; CDKN1C; TRAF2; SERPINE1; NCOA3; MAPK14; TNF; RAF1; IKBKG; MAP3K7; CREBBP; CDKN1A; MAP2K2; JAK1; IL8; NCOA2; AKT1; JAK2; PIK3R1; CHUK; STAT3; MAP2K1; NFKB1; TGFBR1; ESR1; SMAD4; CEBPB; JUN; AR; AKT3; CCL2; MMP1; STAT1; IL6; HSP90AA1; in the case of diseases or disorders associated with or involving ephrin receptor signaling and/or regulation thereof in the brain, neuron, and/or CNS and/or diseases or disorders thereof: PRKCE; ITGAM; ROCK1; ITGA5; CXCR4; IRAK1; PRKAA2; EIF2AK2; RAC1; RAP1A; GRK6; ROCK2; MAPK1; PGF; RAC2; PTPN11; GNAS; PLK1; AKT2; DOK1; CDK8; CREB1; PTK2; CFL1; GNAQ; MAP3K14; CXCL12; MAPK8; GNB2L1; ABL1; MAPK3; ITGA1; KRAS; RHOA; PRKCD; PRKAA1; MAPK9; SRC; CDK2; PIM1; ITGB7; PXN; RAF1; FYN; DYRK1A; ITGB1; MAP2K2; PAK4; AKT1; JAK2; STAT3; ADAM10; MAP2K1; PAK3; ITGB3; CDC42; VEGFA; ITGA2; EPHA8; TTK; CSNK1A1; CRKL; BRAF; PTPN13; ATF4; AKT3; SGK; in the case of diseases or disorders associated with or involving B cell receptor signaling and/or regulation thereof in the brain, neuron, and/or CNS and/or diseases or disorders thereof: RAC1; PTEN; LYN; ELK1; MAPK1; RAC2; PTPN11; AKT2; IKBKB; PIK3CA; CREB1; SYK; NFKB2; CAMK2A; MAP3K14; PIK3CB; PIK3C3; MAPK8; BCL2L1; ABL1; MAPK3; ETS1; KRAS; MAPK13; RELA; PTPN6; MAPK9; EGR1; PIK3C2A; BTK; MAPK14; RAF1; IKBKG; RELB; MAP3K7; MAP2K2; AKT1; PIK3R1; CHUK; MAP2K1; NFKB1; CDC42; GSK3A; FRAP1; BCL6; BCL10; JUN; GSK3B; ATF4; AKT3; VAV3; RPS6KB1; in the case of Infantile neuroaxonal dystroph: PLA2G6; in the case of Gaucher's disease: GBA; in the case of Krabbe disease: GALC; in the case of metachromatic leukodystrophy: ARSA and/or PRSP, isoform specific Saposin B replacement; in the case of Salla disease: SLC17A5; in the case of Farber disease or spinal muscular atrophy with progressive myoclonic epilepsy (also referred to as Jankovic-Rivera syndrome): ASAH1; in the case of Unverricht-Lundborg disease: CSTB; in the case of AADC deficiency: AADC; in the case of autosomal recessive forms of Parkinson's disease: PRKN, and others; in the case of Batten disease: CLN3; in the case of giant axonal neuropathy: GAN; in the case of mucopolysacchariodosis diseases (including MOS1H (Hurler syndrome), MPSII (Hunter syndrome), MPS III A-D: IDUA, IDS, SGSH, NAGLU, HGSNAT, GNS; in the case of Sandhoff disease (HEXB); in the case of GM2 gangliosidosis, AB variant: GM2A; in the case of Canavan disease: ASPA; in the case of cockayne syndrome: CSA or CSB; in the case of neurofibromatosis: NF1 or NF2; or any combination thereof.

### Exemplary Eye Diseases and Associated Genes

[0486] Examples of eye disease-associated genes and polynucleotides that can be modified using the engineered delivery AAV delivery system molecules, vectors, capsids, engineered cells, and/or engineered delivery particles described herein are described below. The compositions described herein can be delivered to one or both eyes to treat or prevent an eye disease, disorder or symptom thereof.

[0487] The compositions described herein can be used to correct ocular defects that arise from several genetic mutations further described in Genetic Diseases of the Eye, Second Edition, edited by Elias I. Traboulsi, Oxford University Press, 2012.

[0488] In some embodiments, the condition to be treated or targeted is an eye disorder. In some embodiments, the eye disorder may include glaucoma. In some embodiments, the eye disorder includes a retinal degenerative disease. In some embodiments, the retinal degenerative disease is selected from Stargardt disease, Bardet-Biedl Syndrome, Best disease, Blue Cone Monochromacy, Choroidermia, Cone-rod dystrophy, Congenital Stationary Night Blindness, Enhanced S-Cone Syndrome, Juvenile X-Linked Retinoschisis, Leber Congenital Amaurosis, Malattia Leventinesse, Norrie Disease or X-linked Familial Exudative Vitreoretinopathy, Pattern Dystrophy, Sorsby Dystrophy, Usher Syndrome, Retinitis Pigmentosa, Achromatopsia or Macular dystrophies or degeneration, Retinitis Pigmentosa, Achromatopsia, and age related macular degeneration. In some embodiments, the retinal degenerative disease is Leber Congenital Amaurosis (LCA) or Retinitis Pigmentosa. Other exemplary eye diseases are described in greater detail elsewhere herein.

[0489] In the case of macular degeneration and/or diabetic retinopathy, the gene target can be VEGF, where the gene expression or gene product of VEGF is reduced or eliminated in the eye, particularly the retina, and particularly when applied subretinally or via another ocular administration route.

[0490] In the case of Best disease, the gene or gene product target can be RDS or VMD2, where knockdown/reduction or elimination of the gene expression or gene product can provide a therapeutic or otherwise beneficial effect, particularly when applied subretinally or via another ocular administration route.

[0491] In the case of Sorsby's fundus dystrophy, the gene or gene product target can be TIMP3, where knockdown/reduction or elimination of the gene expression or gene product can provide a therapeutic or otherwise beneficial effect, particularly when applied subretinally or via another ocular administration route.

[0492] In the case of Stargardt disease, the gene or gene product target can be ABCA4, where knockdown/reduction or elimination of the gene expression or gene product can provide a therapeutic or otherwise beneficial effect, particularly when applied subretinally or via another ocular administration route.

[0493] In the case of Leber's congenital amaurosis type 2, the gene or gene product target can be RPE65, where knockdown/reduction or elimination of the gene expression or gene product can provide a therapeutic or otherwise beneficial effect, particularly when applied subretinally or via another ocular administration route.

[0494] In the case of Choroideremia, the gene or gene product target can be CHM, where knockdown/reduction or elimination of the gene expression or gene product can provide a therapeutic or otherwise beneficial effect, particularly when applied subretinally or via another ocular administration route.

[0495] Other exemplary eye diseases and/or disorders and genetic targets for treatment or prevention are shown in the Tables below and in Genes and Genetics in Eye Diseases: A Genomic Medicine Approach for Investigating Hereditary and Inflammatory Ocular Disorders. International Journal of Ophthalmology, 2018 and Inherited Retinal Diseases: Therapeutics, Clinical Trials and End Points—A Review. Clinical & Experimental Ophthalmology, 2021, 49, 270-288, and the Herediary Ocular Disease Database—available at PG-6T disorders.eyes.arizona.edu/for-patients/handout-list.

| Disease | Gene/variant |
|---|---|
| AMD | NOS2A, CFH, CF, C2, C3, CFB, HTRA1/LOC, MMP-9, |
| | TIMP-3, SLC16A8, etc. |
| Cataract | GEMIN4, CYP51A1, RIC1, TAPT1, TAF1A, WDR87, APE1, |
| | MIP, Cx50/GJA3 & 8, CRYAA, CRYBB2, PRX, POLR3B, |
| | XRCC1, ZNF350, EPHA2, etc. |
| Glaucoma | CALM2, MPP-7, Optineurin, LOX1, CYP1B1, CAV1/2, |
| | MYOC, PITX2, FOXC1, PAX6, CYP1B1, LTBP2, etc. |
| Inherited optic neuropathies | Complex I or ND genes, OPA1, RPE65, etc. |
| Marfan syndrome | FBN1, TGFBR2, MTHFR, MTR, MTRR, etc. |
| Myopia | HGF, C-MET, UMODL1, MMP-1/2, PAX6, CBS, MTHFR, |
| | IGF-1, UHRF1BP1L, PTPRR, PPFIA2, P4HA2, etc. |
| Polypoidal choroidal | C2, C3, CFH, SERPING1, PEDF, ARMS2-HTRA1, FGD6, |
| vasculopathies | ABCG1, LOC387715, CETP, etc. |
| Retinitis pigmentosa (RCD) | RPGR, PRPF3, HK1, AGBL5, etc. |
| Stargardt's disease | ABC1, ABCA4, CRB1, etc. |
| Uveal melanoma | PTEN, BAP1, GNAQ, GNA11, DDEF1, SF3B1, EIF1AX, |
| | CDKN2A, p14ARF, HERC2/OCA2, etc. |

| Disease | Gene/variant |
|---|---|
| Best disease | BEST1 |
| X-Linked retinoschisis | RS1 |
| Pattern dystrophy | PRPH2 |
| Sorsby fundus dystrophy | TIMP3 |
| Achromatopsia | CNGB3, CNGA3, GNAT2, ATF6, PDE6H, PDE6C |
| Blu cone monochromatism | OPN1LW, OPN1MW, |
| Bornholm eye disease | OPN1LW, OPN1MW |
| ADGUCA1A-associated | GUCA1A |
| COD/CORD | |
| ADGUCY2D-associated | GUCY2D |
| COD/CORD | |
| Autosomal dominantPRPH2- | PRPH2 |
| associated CORD | |
| Autosomal recessiveABCA4- | ABCA4 |
| associated COD/CORD | |
| X-linkedRPGR- | RPGR |
| associatedCOD/CORD | |
| Fundus Albipunctatus (FA) | RDH5, RLBP1, RPE65 |
| RCD (retinitis pigmentosa) | MERTK, MYO7A, USH2A, PDE6B, RLBP1, RHO, RP2 |
| Enhanced S-conesyndrome | NR2E3 |
| (ESCS) | |
| Bietti crystalline | CYP4V2 |
| corneoretinaldystrophy (BCD) | |
| LEBER | GUCY2D, CEP290, RPE65, AIPL1 |
| CONGENITALAMAUROSIS | |
| (LCA) ANDEARLY-ONSET | |
| SEVERE | |
| RETINALDYSTROPHY | |
| (EOSRD) | |
| Choroideremia (CHM) | CHM |

### Exemplar Inner Diseases and Associated Genes

[0496] Examples of ear, particularly inner ear, disease-associated genes and polynucleotides that can be modified using the engineered delivery AAV delivery system molecules, vectors, capsids, engineered cells, and/or engineered delivery particles described herein are described below. The compositions described herein can be delivered to one or both ears, particularly to the inner ear, to treat or prevent an ear disease, disorder or symptom thereof, particularly an inner ear disease, disorder, or symptom thereof.

[0497] In certain example embodiments, the inner ear disease or disorder is GJB-2 deafness, Jeryell and Lange-Nielsen syndrome, Usher syndrome, Alport syndrome, Branchio-oto-renal syndrome, Waardenburg syndrome, Pendred syndrome, Stickler syndrome, Treacher Collins syndrome, CHARGE syndrome, Norrie disease, Perrault syndrome, Autosomal dominant Nonsyndromic hearing loss, utosomal Recessive Nonsyndromic Hearing Loss, X-linked nonsyndromic hearing loss, an auditory neuropathy, a congenital hearing loss, or any combination thereof.

[0498] In the case of GJB-2 deafness, the GJB-2 gene can be replaced. Genes associated with CHARGE syndrome: SFMA3E, CHD7. Genes associated with Norrie Disease: NDP. Genes associated with Pendred Syndrome: FOMO1, KCNJ10. Genes associated with Perrault syndrome: HSD17B4, HARS2, CLPP*, LARS2, TWNK ERAL1.

[0499] Genes associated with Autosomal Dominant Nonsyndromic Hearing Loss may comprise: DIAPH1, KCNQ4, GJB3, IFNLR1, GJB2, GJB6, MYH14, CEACAM16, GSDME/DFNA5, WFS1, LMX1A, TECTA, COCH, EYA4, MYO7A, COL11A2, POU4F3, MYH9, ACTG1, MYO6, SIX1, SLC17A8, REST, GRHL2, NLRP3, TMC1, COL11A1, CRYM, P2RX2, CCDC50, MIRN96, TJP2, TNC, SMAC/DIABLO. TBC1D24, CD164, OSBPL2, HOMER2, KITLG, MCM2, PTPRQ, DMXL2, MYO3A, PDE1C, TRRAP, PLS1, ATP2B2, SCD5, SLC12A2, MAP1B, RIPOR2/FAM65B. Genes associated with Autosomal Recessive Nonsyndromic Hearing Loss may comprise: GJB2, MYO7A, MYO15A, SLC26A4, TMIE, TMC1, TMPRSS3, OTOF, CDH23, GIPC3, STRC, USHIC, OTOG, TECTA, OTOA, PCDH15, RDX, GRXCR1, GAB1, TRIOBP, CLDN14, MYO3A, WHRN, CDC14A, ESRRB, ESPN, MYO6, HGF, ILDR1, ADCY1, CIB2, MARVELD2, BDP1, COL11A2, PDZD7, PJVK, SLC22A4, SLC26A5, LRTOMT/COMT2, DCDC2, LHFPL5, S1PR2, PNPT1, BSND, MSRB3, SYNE4, LOXID1, TPRN, GPSM2, PTPRQ, OTOGL, TBC1D24, ELMOD3, KARS, SERPINB6, CABP2, NARS2, MET, TSPEAR, TMEM132E, PPIP5K2, GRXCR2, EPS8, CLIC5, FAM65B/RIPOR2, EPS8L2, ROR1, WBP2, ESRP1, MPZL2, CEACAM16, GRAP, SPNS2, CLDN9, CLRN2, GAS2. Genes associated X-Linked Nonsyndromic Hearing Loss PRPS1, POU3F4, SMPX, AIFM1, COL4A6. Genes associated with Auditory Neuropathy: DIAPH3.

[0500] Other exemplary diseases and associated target gene or gene products for treatment or prevention are shown in the table below and further described in Congenital Hearing Loss. Nature Reviews Disease Primers, 2017, 3.

TABLE 5

| Syndrome | Proteins involved (coding genes) |
|---|---|
| Jervell and | Potassium voltage-gated channel subfamily E member 1 |
| Lange-Nielsen | (KCNE1) and potassium voltage-gated channel subfamily KQT |
| | member 1 (KCNQ1) |
| Usher | Usher syndrome type 1: Unconventional myosin-VIIa |
| | (MYO7A), harmonin (USH1C), cadherin-23 (CDH23), |
| | protocadherin-15 (PCDH15), Usher syndrome type-1G protein |
| | (USH1G) and calcium and integrin-binding family member 2 |
| | (CIB2) |
| | Usher syndrome type 2: usherin (USH2A), adhesion G protein- |
| | coupled receptor V1 (ADGRV1) and whirlin (WHRN) |
| | Usher syndrome type 3: clarin-1 (CLRN1) |
| Alport | Collagen alpha-3(IV) chain (COL4A3), collagen alpha-4(IV) |
| | chain (COL4A4) and collagen alpha-5(IV) chain (COL4A5) |
| Branchio- | Eyes absent homolog 1 (EYA1), homeobox protein SIX1 |
| oto-renal | (SIX1) and homeobox protein SIX5 (SIX5) |
| Waardenburg | Paired box protein Pax-3 (PAX3), microphthalmia-associated |
| | transcription factor (MITF, endothelin-3 (EDN3), endothelin B |
| | receptor (EDNRB), zinc finger protein SNAI2 (SNAI2) and |
| | transcription factor SOX-10 (SOX10) |
| Pendred | Pendrin (SLC26A4) |
| Stickler | Collagen alpha-1151 chain (COL2A1), collagen alpha-1(IX) |
| | chain (COL9A1), collagen alpha-2(IX) chain (COL9A2), |
| | collagen alpha-1(XI) chain (COL11A1) and collagen alpha- |
| | 2(XI) chain (COL11A2) |
| Treacher | Treacle protein (TCOF1), DNA-directed RNA polymerases I |
| Collins | and III subunit RPAC1 (POLR1C) and DNA-directed RNA |
| | polymerases I and III subunit RPAC2 (POLR1D) |

### Method of Modifying Genes

[0501] It will be appreciated that in any case where the gene is defective, a gene replacement strategy, gene editing or other approach can be appropriate.

[0502] Thus, also described herein are methods of inducing one or more mutations in a eukaryotic or prokaryotic cell (in vitro, i.e., in an isolated eukaryotic cell) as herein discussed comprising delivering to cell a vector as described herein. The mutation(s) can include the introduction, deletion, or substitution of one or more nucleotides at a target sequence of cell(s). In some embodiments, the mutations can include the introduction, deletion, or substitution of 1-75 nucleotides at each target sequence of said cell(s). The mutations can include the introduction, deletion, or substitution of 1, 5, 10, 11, 12, 13, 14, 15, 16, 17, 18, 19, 20, 21, 22, 23, 24, 25, 26, 27, 28, 29, 30, 35, 40, 45, 50, or 75 nucleotides at each target sequence. The mutations can include the introduction, deletion, or substitution of 5, 10, 11, 12, 13, 14, 15, 16, 17, 18, 19, 20, 21, 22, 23, 24, 25, 26, 27, 28, 29, 30, 35, 40, 45, 50, or 75 nucleotides at each target sequence of said cell(s). The mutations include the introduction, deletion, or substitution of 10, 11, 12, 13, 14, 15, 16, 17, 18, 19, 20, 21, 22, 23, 24, 25, 26, 27, 28, 29, 30, 35, 40, 45, 50, or 75 nucleotides at each target sequence of said cell(s). The mutations can include the introduction, deletion, or substitution of 20, 21, 22, 23, 24, 25, 26, 27, 28, 29, 30, 35, 40, 45, 50, or 75 nucleotides at each target sequence of said cell(s). The mutations can include the introduction, deletion, or substitution of 40, 45, 50, 75, 100, 200, 300, 400 or 500 nucleotides at each target sequence of said cell(s). The mutations can include the introduction, deletion, or substitution of 500, 600, 700, 800, 900, 1000, 1100, 1200, 1300, 1400, 1500, 1600, 1700, 1800, 1900, 2000, 2100, 2200, 2300, 2400, 2500, 2600, 2700, 2800, 2900, 3000, 3100, 3200, 3300, 3400, 3500, 3600, 3700, 3800, 3900, 4000, 4100, 4200, 4300, 4400, 4500, 4600, 4700, 4800, 4900, 5000, 5100, 5200, 5300, 5400, 5500, 5600, 5700, 5800, 5900, 6000, 6100, 6200, 6300, 6400, 6500, 6600, 6700, 6800, 6900, 7000, 7100, 7200, 7300, 7400, 7500, 7600, 7700, 7800, 7900, 8000, 8100, 8200, 8300, 8400, 8500, 8600, 8700, 8800, 8900, 9000, 9100, 9200, 9300, 9400, 9500, 9600, 9700, 9800, or 9900 to 10000 nucleotides at each target sequence of said cell(s).

[0503] In some embodiments, the modifications can include the introduction, deletion, or substitution of nucleotides at each target sequence of said cell(s) via nucleic acid components (e.g., guide(s) RNA(s) or sgRNA(s)), such as those mediated by a CRISPR-Cas system.

[0504] In some embodiments, the modifications can include the introduction, deletion, or substitution of nucleotides at a target or random sequence of said cell(s) via a non CRISPR-Cas system or technique. Such techniques are discussed elsewhere herein, such as where engineered cells and methods of generating the engineered cells and organisms are discussed.

[0505] For minimization of toxicity and off-target effect when using a CRISPR-Cas system, it may be important to control the concentration of Cas mRNA and guide RNA delivered. Optimal concentrations of Cas mRNA and guide RNA can be determined by testing different concentrations in a cellular or non-human eukaryote animal model and using deep sequencing the analyze the extent of modification at potential off-target genomic loci. Alternatively, to minimize the level of toxicity and off-target effect, Cas nickase mRNA (for example S. pyogenes Cas9-like with the D10A mutation) can be delivered with a pair of guide RNAs targeting a site of interest. Guide sequences and strategies to minimize toxicity and off-target effects can be as in WO 2014/093622 (PCT/US2013/074667); or, via mutation as herein.

[0506] Typically, in the context of an endogenous CRISPR system, formation of a CRISPR complex (comprising a guide sequence hybridized to a target sequence and complexed with one or more Cas proteins) results in cleavage of one or both strands in or near (e.g., within 1, 2, 3, 4, 5, 6, 7, 8, 9, 10, 20, 50, or more base pairs from) the target sequence. Without wishing to be bound by theory, a tracr sequence, which may comprise or consist of all or a portion of a wild-type tracr sequence (e.g., about or more than about 20, 26, 32, 45, 48, 54, 63, 67, 85, or more nucleotides of a wild-type tracr sequence), may also form part of a CRISPR complex, such as by hybridization along at least a portion of the tracr sequence to all or a portion of a tracr mate sequence that is operably linked to a guide sequence.

[0507] In one embodiment, the invention provides a method of modifying a target polynucleotide in a eukaryotic cell. In some embodiments, the method includes delivering an engineered targeting moiety, polypeptide, polynucleotide, vector, vector system, particle, viral (e.g., AAV) particle, cell, or any combination thereof described herein having a CRISPR-Cas molecule as a cargo molecule to a subject and/or cell. The CRISPR-Cas system molecule(s) delivered can complex to bind to the target polynucleotide, e.g., to effect cleavage of said target polynucleotide, thereby modifying the target polynucleotide, wherein the CRISPR complex comprises a CRISPR enzyme complexed with a guide sequence hybridized to a target sequence within said target polynucleotide, wherein said guide sequence can be linked to a tracr mate sequence which in turn hybridizes to a tracr sequence. In some embodiments, said cleavage comprises cleaving one or two strands at the location of the target sequence by said CRISPR enzyme. In some embodiments, said cleavage results in decreased transcription of a target gene. In some embodiments, the method further comprises repairing said cleaved target polynucleotide by homologous recombination with an exogenous template polynucleotide, wherein said repair results in a mutation comprising an insertion, deletion, or substitution of one or more nucleotides of said target polynucleotide. In some embodiments, said mutation results in one or more amino acid changes in a protein expressed from a gene comprising the target sequence. In some embodiments, the method further comprises delivering one or more vectors to said eukaryotic cell, wherein one or more vectors comprise the CRISPR enzyme and one or more vectors drive expression of one or more of: the guide sequence linked to the tracr mate sequence, and the tracr sequence. In some embodiments, said CRISPR enzyme drive expression of one or more of: the guide sequence linked to the tracr mate sequence, and the tracr sequence. In some embodiments such CRISPR enzyme are delivered to the eukaryotic cell in a subject. In some embodiments, said modifying takes place in said eukaryotic cell in a cell culture. In some embodiments, the method further comprises isolating said eukaryotic cell from a subject prior to said modifying. In some embodiments, the method further comprises returning said eukaryotic cell and/or cells derived therefrom to said subject. In some embodiments, the isolated cells can be returned to the subject after delivery of one or more engineered targeting moieties, polypeptides, polynucleotides, vectors, vector systems, particles, viral (e.g., AAV) particles, cells, or any combination thereof described herein to the isolated cell. In some embodiments, the isolated cells can be returned to the subject after delivering one or more molecules of the engineered delivery system described herein to the isolated cell, thus making the isolated cells engineered cells as previously described.

### Screening and Cell Selection

[0508] The targeting moieties, polypeptides, polynucleotides, vectors, vector systems, particles, viral (e.g., AAV) particles, cells, or any combination thereof described herein described herein can be used in a screening assay and/or cell selection assay. The engineered targeting moieties, polypeptides, polynucleotides, vectors, vector systems, particles, viral (e.g., AAV) particles, cells, or any combination thereof described herein can be delivered to a subject and/or cell. In some embodiments, the cell is a eukaryotic cell. The cell can be in vitro, ex vivo, in situ, or in vivo. The targeting moieties, polypeptides, polynucleotides, vectors, vector systems, particles, viral (e.g., AAV) particles, cells, or any combination thereof described herein can introduce an exogenous molecule or compound, such as a cargo, to subject or cell to which they are delivered. The presence of an exogenous molecule or compound can be detected which can allow for identification of a cell and/or attribute thereof. In some embodiments, the delivered molecules or particles can impart a gene or other nucleotide modification (e.g., mutations, gene or polynucleotide insertion and/or deletion, etc.). In some embodiments the nucleotide modification can be detected in a cell by sequencing. In some embodiments, the nucleotide modification can result in a physiological and/or biological modification to the cell that results in a detectable phenotypic change in the cell, which can allow for detection, identification, and/or selection of the cell. In some embodiments, the phenotypic change can be cell death, such as embodiments where binding of a CRISPR complex to a target polynucleotide results in cell death. Embodiments of the invention allow for selection of specific cells without requiring a selection marker or a two-step process that may include a counter-selection system. The cell(s) may be prokaryotic or eukaryotic cells.

[0509] In one embodiment the invention provides for a method of selecting one or more cell(s) by introducing one or more mutations in a gene in the one or more cell (s), the method comprising: introducing one or more vectors, which can include one or more engineered delivery system molecules or vectors described elsewhere herein, into the cell (s), wherein the one or more vectors can include a CRISPR enzyme and/or drive expression of one or more of: a guide sequence linked to a tracr mate sequence, a tracr sequence, and an editing template; or other polynucleotide to be inserted into the cell and/or genome thereof; wherein, for example that which is being expressed is within and expressed in vivo by the CRISPR enzyme and/or the editing template, when included, comprises the one or more mutations that abolish CRISPR enzyme cleavage; allowing homologous recombination of the editing template with the target polynucleotide in the cell(s) to be selected; allowing a CRISPR complex to bind to a target polynucleotide to effect cleavage of the target polynucleotide within said gene, wherein the CRISPR complex comprises the CRISPR enzyme complexed with (1) the guide sequence that is hybridized to the target sequence within the target polynucleotide, and (2) the tracr mate sequence that is hybridized to the tracr sequence, wherein binding of the CRISPR complex to the target polynucleotide induces cell death, thereby allowing one or more cell(s) in which one or more mutations have been introduced to be selected. In a preferred embodiment, the CRISPR enzyme is a Cas protein. In another embodiment of the invention the cell to be selected may be a eukaryotic cell.

[0510] The screening methods involving the engineered targeting moieties, polypeptides, polynucleotides, vectors, vector systems, particles, viral (e.g., AAV) particles, cells, or any combination thereof described herein, including but not limited to those that deliver one more CRISPR-Cas system molecules to cell, can be used in detection methods such as fluorescence in situ hybridization (FISH). In some embodiments, one or more components of an engineered CRISPR-Cas system that includes a catalytically inactive Cas protein, can be delivered by engineered targeting moieties, polypeptides, polynucleotides, vectors, vector systems, particles, viral (e.g., AAV) particles, cells, or any combination thereof described herein to a cell and used in a FISH method. The CRISPR-Cas system can include an inactivated Cas protein (dCas) (e.g., a dCas9), which lacks the ability to produce DNA double-strand breaks may be fused with a marker, such as fluorescent protein, such as the enhanced green fluorescent protein (eEGFP) and co-expressed with small guide RNAs to target pericentric, centric and teleomeric repeats in vivo. The dCas system can be used to visualize both repetitive sequences and individual genes in the human genome. Such new applications of labelled dCas, dCas CRISPR-Cas systems, engineered targeting moieties, polypeptides, polynucleotides, vectors, vector systems, particles, viral (e.g., AAV) particles, cells, or any combination thereof described herein can be used in imaging cells and studying the functional nuclear architecture, especially in cases with a small nucleus volume or complex 3-D structures. (Chen B, Gilbert L A, Cimini B A, Schnitzbauer J, Zhang W, Li G W, Park J, Blackbum E H, Weissman J S, Qi L S, Huang B. 2013. Dynamic imaging of genomic loci in living human cells by an optimized CRISPR/Cas system. Cell 155(7):1479-91. doi: 10.1016/j.cell.2013.12.001., the teachings of which can be applied and/or adapted to the CRISPR systems described herein. A similar approach involving a polynucleotide fused to a marker (e.g., a fluorescent marker) can be delivered to a cell via engineered targeting moieties, polypeptides, polynucleotides, vectors, vector systems, particles, viral (e.g., AAV) particles, cells, or any combination thereof described herein and integrated into the genome of the cell and/or otherwise interact with a region of the genome of a cell for FISH analysis.

[0511] Similar approaches for studying other cell organelles and other cell structures can be accomplished by delivering to the cell (e.g., via an engineered targeting moieties, polypeptides, polynucleotides, vectors, vector systems, particles, viral (e.g., AAV) particles, cells, or any combination thereof described herein) one or more molecules fused to a marker (such as a fluorescent marker), wherein the molecules fused to the marker are capable of targeting one or more cell structures. By analyzing the presence of the markers, one can identify and/or image specific cell structures.

[0512] In some embodiments, the engineered targeting moieties, polypeptides, polynucleotides, vectors, vector systems, particles, viral (e.g., AAV) particles, cells, or any combination thereof described herein can be used in a screening assay inside or outside of a cell. In some embodiments, the screening assay can include delivering a CRISPR-Cas cargo molecule(s) via engineered targeting moieties, polypeptides, polynucleotides, vectors, vector systems, particles, viral (e.g., AAV) particles, cells, or any combination thereof described herein.

[0513] Use of the present system in screening is also provided by the present invention, e.g., gain of function screens. Cells which are artificially forced to overexpress a gene are able to down regulate the gene over time (re-establishing equilibrium) e.g., by negative feedback loops. By the time the screen starts, the unregulated gene might be reduced again. Other screening assays are discussed elsewhere herein.

[0514] In an embodiment, the invention provides a cell from or of an in vitro method of delivery, wherein the method comprises contacting the delivery system with a cell, optionally a eukaryotic cell, whereby there is delivery into the cell of constituents of the delivery system, and optionally obtaining data or results from the contacting, and transmitting the data or results.

[0515] In an embodiment, the invention provides a cell from or of an in vitro method of delivery, wherein the method comprises contacting the delivery system with a cell, optionally a eukaryotic cell, whereby there is delivery into the cell of constituents of the delivery system, and optionally obtaining data or results from the contacting, and transmitting the data or results; and wherein the cell product is altered compared to the cell not contacted with the delivery system, for example altered from that which would have been wild type of the cell but for the contacting. In an embodiment, the cell product is non-human or animal. In some embodiments, the cell product is human.

[0516] In some embodiments, a host cell is transiently or non-transiently transfected with one or more vectors described herein. In some embodiments, a cell is transfected as it naturally occurs in a subject optionally to be reintroduced therein. In some embodiments, a cell that is transfected is taken from a subject. In some embodiments, the cell obtained from or is derived from cells taken from a subject, such as a cell line. Delivery mechanisms and techniques of the targeting moieties, polypeptides, polynucleotides, vectors, vector systems, particles, viral (e.g., AAV) particles, cells, or any combination thereof described herein.

[0517] In some embodiments, it is envisaged to introduce one or more of the engineered targeting moieties, polypeptides, polynucleotides, vectors, vector systems, particles, viral (e.g., AAV) particles, cells, or any combination thereof described herein directly to the host cell. For instance, the engineered AAV capsid system molecule(s) can be delivered together with one or more cargo molecules to be packaged into an engineered AAV particle.

[0518] In some embodiments, the invention provides a method of expressing an engineered delivery molecule and cargo molecule to be packaged in an engineered viral (e.g., AAV) particle in a cell that can include the step of introducing the vector according any of the vector delivery systems disclosed herein.

### Receptor Screening

[0519] Described in certain example embodiments herein are assays and methods for screening and identifying cell and tissue surface receptors that facilitate transduction by one or more of the CNS specific targeting moieties of the present invention. In some embodiments, such a method can be based upon an RNAi, CRISPR activation (CRISPRa), CRISPR inhibition (CRISPRi) or CRISPR knockdown or knockout approach. In some embodiments, such a method can be based upon a small molecule library screening.

[0520] In some embodiments, the method includes contacting one or more cells with a CRISPRa, CRISPRi, or CRISPRkd/ko system or component thereof thereby increasing or decreasing expression of genes to which the system is targeted and transducing the one or more cells with a composition comprising a targeting moiety effective to target a CNS cell of the present invention, and detecting, quantifying, or otherwise measuring transduction efficiency of the composition a targeting moiety effective to target a CNS cell of the present invention to determine or otherwise identify genes, pathways, programs, receptors, and/or the like involved with or that mediates transduction of the compositions comprising a targeting moiety effective to target a CNS cell of the present invention and/or are capable of enhancing and/or reducing transduction by one or more of the compositions comprising a targeting moiety effective to target a CNS cell of the present invention. In some embodiments, the CRISPRa, CRISPRi, CRISPRkd/ko system comprises a dCas, such as a dCas9, dCas12, or other inactive Cas which are described in greater detail elsewhere herein. In some embodiments the CRSIPRi system comprises a dCas12 General principles of CRISPRa, CRISPRi, and CRISPRko/kd screens are known in the art. See also e.g., Chong et al., Trends Cell Biol. 2020 August; 30(8):619-627; Ramkumar et al., Blood Adv. 2020 Jul. 14; 4(13):2899-2911; Semesta et al., PLoS Genet. 2020 Oct. 14; 16(10); Kampamann et al., ACS Chem Biol. 2018 Feb. 16; 13(2):406-416; Sanson et al., Nat Commun. 2018 Dec. 21; 9(1):5416; Gilbert et al., Cell. 2014 Oct. 23; 159(3):647-61; Tian et al., Neuron. 2019 Oct. 23; 104(2):239-255.e12; Tian et al., Nat Neurosci. 2021 July; 24(7):1020-1034; Kampmann et al., Nat Rev Neurol. 2020 September; 16(9):465-480; Schuster et al., Trends Biotechnol. 2019 January; 37(1):38-55; Dominguez et al., Nat Rev Mol Cell Biol. 2016 January; 17(1):5-15; Dudek et al., Mol Ther. 2020 Feb. 5; 28(2):367-381; Chow and Chen. Trends Cancer. 2018 May; 4(5):349-358, Hanna and Doench. Nat Biotechnol. 2020 July; 38(7):813-823, Qi et al., Cell. 152(5):1173-1183 (2013); the teachings of which can be adapted for use with the present invention.

[0521] In some embodiments, the method includes contacting one or more cells with one or more small molecules, such as a small molecule or chemical library in which the small molecules contained in the library have known effects on particular cell surface molecules and/or receptors, optionally those known to be involved with viral, and more particularly AAV, transduction, and transducing composition a targeting moiety effective to target a CNS cell of the present invention and detecting, quantifying, or otherwise measuring transduction efficiency of the composition a targeting moiety effective to target a CNS cell of the present invention to determine or otherwise identify cell surface molecules and/or receptors and/or the like involved with or that mediates transduction of the compositions comprising a targeting moiety effective to target a CNS cell of the present invention and/or are capable of enhancing and/or reducing transduction by one or more of the compositions comprising a targeting moiety effective to target a CNS cell of the present invention.

[0522] The screening can be carried out using any suitable low or high throughput approaches, examples of which are provided elsewhere herein and are generally known in the art. In some embodiments, the screening can be done in vitro or ex vivo using cells, cell populations, organoids, tissue explants, and/or the like. In some embodiments, the screening can be done in vivo, such as via animal models, including, but not limited to mouse and non-human primates.

[0523] In some embodiments, the compositions comprising a targeting moiety effective to target a CNS cell of the present invention contain a cargo molecule that is a reporter molecule to facilitate transduction detection, quantification and measurement. Exemplary reporter cargo molecules are described in greater detail elsewhere herein.

[0524] In some embodiments, the method further includes directed evolution of viral, such as AAV, capsids based on genes, pathways, programs, cell-surface receptors and/or the like identified in a screen previously described so as to further evolve n-mer motifs to enhance transduction efficacy of the CNS targeting moieties.

[0525] The invention is further described in the following examples, which do not limit the scope of the invention described in the claims. Further embodiments are illustrated in the following Examples which are given for illustrative purposes only and are not intended to limit the scope of the invention.

### EXAMPLES

### Example 1—mRNA Based Detection Methods are More Stringent for Selection of AAV Variants

[0526] FIG. 1 demonstrates the adeno-associated virus (AAV) transduction mechanism, which results in production of mRNA. As is demonstrated in FIG. 1, functional transduction of a cell by an AAV particle can result in the production of an mRNA strand. Non-functional transduction would not produce such a product despite the viral genome being detectable using a DNA-based assay. Thus, mRNA-based detection assays to detect transduction by e.g., an AAV can be more stringent and provide feedback as to the functionality of a virus particle that is able to functionally transduce a cell. FIG. 2 shows a graph that can demonstrate that mRNA-based selection of AAV variants can be more stringent than DNA-based selection. The virus library was expressed under the control of a CMV promoter.

### Example 2—mRNA Based Detection Methods can be Used to Detect AAV Capsid Variants from a Capsid Variant Library

[0527] FIGS. 3A-3B show graphs that can demonstrate a correlation between the virus library and vector genome DNA (FIG. 3A) and mRNA (FIG. 3B) in the liver. FIGS. 4A-4F show graphs that can demonstrate capsid variants expressed at the mRNA level identified in different tissues.

### Example 3—Capsid mRNA Expression can be Driven by Tissue Specific Promoters

[0528] FIGS. 5A-5C show graphs that can demonstrate capsid mRNA expression in different tissues under the control of cell-type specific promoters (as noted on x-axis). CMV was included as an exemplary constitutive promoter. CK8 is a muscle-specific promoter. MHCK7 is a muscle-specific promoter. hSyn is a neuron specific promoter.

### Example 4—Capsid Variant Library Generation, Variant Screening, and Variant Identification

[0529] Generally, an AAV capsid library can be generated by expressing engineered capsid vectors each containing an engineered AAV capsid polynucleotide previously described in an appropriate AAV producer cell line. See e.g., FIG. 8. This can generate an AAV capsid library that can contain one more desired cell specific engineered AAV capsid variant. FIG. 7 shows a schematic demonstrating embodiments of generating an AAV capsid variant library, particularly insertion of a random n-mer (n=e.g., 3-25 or 3-15 amino acids) into a wild-type AAV, e.g., AAV9. In this example, random 7-mers were inserted between aa588-589 of variable region VIII of AAV9 viral protein and used to form the viral genome containing vectors with one variant per vector. As shown in FIG. 8, the capsid variant vector library was used to generate AAV particles where each capsid variant encapsulated its coding sequence as the vector genome. FIG. 9 shows vector maps of representative AAV capsid plasmid library vectors (see e.g., FIG. 8) that can be used in an AAV vector system to generate an AAV capsid variant library. The library can be generated with the capsid variant polynucleotide under the control of a tissue specific promoter or constitutive promoter. The library was also made with capsid variant polynucleotide that included a polyadenylation signal.

[0530] As shown in FIG. 6A the AAV capsid library can be administered to various non-human animals for a first round of mRNA-based selection. As shown in FIG. 1, the transduction process by AAVs and related vectors can result in the production of an mRNA molecule that is reflective of the genome of the virus that transduced the cell. As is at least demonstrated in the Examples herein, mRNA based selection can be more specific and effective to determine a virus particle capable of functionally transducing a cell because it is based on the functional product produced as opposed to just detecting the presence of a virus particle in the cell by measuring the presence of viral DNA.

[0531] As is further shown in FIG. 6A, after first-round administration, one or more engineered AAV virus particles having a desired capsid variant can then be used to form a filtered AAV capsid library. Desirable AAV virus particles can be identified by measuring the mRNA expression of the capsid variants and determining which variants are highly expressed in the desired cell type(s) as compared to non-desired cells type(s). Those that are highly expressed in the desired cell, tissue, and/or organ type are the desired AAV capsid variant particles. In some embodiments, the AAV capsid variant encoding polynucleotide is under control of a tissue-specific promoter that has selective activity in the desired cell, tissue, or organ.

[0532] The engineered AAV capsid variant particles identified from the first round can then be administered to various non-human animals. In some embodiments, the animals used in the second round of selection and identification are not the same as those animals used for first round selection and identification. Similar to round 1, after administration the top expressing variants in the desired cell, tissue, and/or organ type(s) can be identified by measuring viral mRNA expression in the cells. The top variants identified after round two can then be optionally barcoded and optionally pooled. In some embodiments, top variants from the second round can then be administered to a non-human primate to identify the top cell-specific variant(s), particularly if the end use for the top variant is in humans. Administration at each round can be systemic. As further shown in FIG. 6B after the second round of selection, a third round of selection, which can optionally include benchmarking against known, control, and/or standard (e.g., benchmark) variants can be performed.

[0533] FIG. 10 shows a graph that can demonstrate the viral titer (calculated as AAV9 vector genome/15 cm dish) produced by libraries generated using different promoters. As demonstrated in FIG. 10, virus titer was not affected significantly be the use of different promoters.

### Example 5—CNS n-Mer Inserts

[0534] CNS n-mer inserts were generated as described elsewhere herein and then screened for transduction efficiency in various strains of mice (C57BL/6J and BALB/cJ). Table 1 shows the top motifs based on CNS transduction. As previously discussed, each n-mer insert's transduction efficacy in CNS cells was tested with both AQ and DG as the aa587 and aa588 (the two amino acids in the AAV immediately preceding the n-mer insert. Some exemplary n-mer inserts that stood out when preceded by AQ are KTVGTVY (SEQ ID NO: 3), RSVGSVY (SEQ ID NO: 4), RYLGDAS (SEQ ID NO: 5), WVLPSGG (SEQ ID NO: 6), VTVGSIY (SEQ ID NO: 7), VRGSSIL (SEQ ID NO: 8), RHHGDAA (SEQ ID NO: 9), VIQAMKL (SEQ ID NO: 10), LTYGMAQ (SEQ ID NO: 11), LRIGLSQ (SEQ ID NO: 12), GDYSMIV (SEQ ID NO: 13), VNYSVAL (SEQ ID NO: 14), RHIADAS (SEQ ID NO: 15), RYLGDAT (SEQ ID NO: 16), QRVGFAQ (SEQ ID NO; 17), QIAHGYST (SEQ ID NO: 18), WTLESGH (SEQ ID NO: 19), and GENSARW (SEQ ID NO: 20).

[0535] Some exemplary n-mer inserts that stood out when preceded by DG are ASNPGRW (SEQ ID NO: 22), WTLESGH (SEQ ID NO: 23), REQKKLW (SEQ ID NO: 24), ERLLVQL (SEQ ID NO: 25), RMQRTLY (SEQ ID NO: 26), and REQQKLW (SEQ ID NO: 21). Engineered AAVs including a CNS n-mer of Table 1 demonstrated the ability to specifically transduce CNS cells in both strains of mice, which is in contrast to the commonly used in the art CNS AAV. Without being bound by theory, this observation can demonstrate that the engineered AAVs containing an CNS-specific n-mer insert described herein can operate through a different receptor on the surface of CNS cells than the conventional AAV used in the art to achieve CNS specificity. Given that n-mer inserts preceded by AQ with top scores did not necessarily perform the same when preceded by DG can suggest that the 3D structure of the capsid conferred by the n-mer and its interaction with endogenous AAV amino acids can influence the ability of the engineered AAV capsid to transduce a cell and thus, without being bound by theory, can play a role in contributing to the cell-type specificity of the engineered capsids.

### Example 6—Exemplary CNS n-Mer Inserts in Non-Human Primates

[0536] CNS n-mer inserts were generated as described elsewhere herein and then screened for transduction efficiency in non-human primates. Tables 2-3 show the top n-mer inserts. A general motif was observed across the very top hits (Table 3). The motif observed was P-motif having the formula amino acid sequence PX₁QGTX₂R, (SEQ ID NO: 317) wherein X₁ and X₂ are each selected from any amino acid. Exemplary n-mer insert variants containing a P-motif are shown in Table 3.

### Example 7—Benchmarking

[0537] As shown in FIGS. 6A-6B shows a general schematic for selecting CNS specific capsid, which includes a benchmarking round which evaluates the performance of selected capsids against currently used capsids for, e.g., delivery to the CNS. Table 67 shows the selected capsids used in the benchmarking round of selection. Four variants developed using selection in mice and 8 using selection in NHPs were used for benchmarking. For benchmarking here, capsid variant specific barcodes were included with each variant. Viral particles for each capsid variant were produced individually and viral particles were then pooled. Such barcoding and pooling methodology is described in greater detail elsewhere herein and applied in this context. Pooled viral particles were then injected systemically (via I.V. administration) to the periphery of different mouse strains (C57BL/6J (“(C57”) and BALB/c (“BALBc”)) and non-human primates (Macaques) so that the ability for the capsid variants to cross the blood brain barrier in different species could be evaluated. Included in the benchmarking were both engineered capsid variants from mouse and non-human primate selection (rounds 1 and/or 2) and currently used capsid variants (AAV-CAP-B10, AAV-CAP-B22, and AAV-PhP.22). mRNA and DNA corresponding to the capsid variants in various tissues were then examined to determine the CNS, strain, and species specificity of the capsid variants.

TABLE 6

| Capsid variant | Insert sequence | SEQ ID NO: |
|---|---|---|
| Mouse variant 1 | RSVGSVY | 318 |
| Mouse variant 2 | KTVGTVY | 319 |
| Mouse variant 3 | WVLPSGG | 320 |
| Mouse variant 4 | (DG)REQQKLW | 321 |
| NHP variant 1 | PTQGTVR | 322 |
| NHP variant 2 | PSQGTLR | 323 |
| NHP variant 3 | PTQGTLR | 324 |
| NHP variant 4 | RVDPSGL | 325 |
| NHP variant 5 | VVSDYTV | 326 |
| NHP variant 6 | TDALTTK | 327 |
| NHP variant 7 | STIPTMK | 328 |
| NHP variant 8 | PTQGTFR | 329 |

[0538] FIGS. 11A-11P show results from benchmarking the top selected capsids out of the second round of selection. In agreement with the literature, the AAV-CAP-B10, AAV-CAP22, and AAV-PhP.22 capsids demonstrated a species and strain preference, and importantly did not appear to perform well in non-human primates. Indeed, the NHP capsid variants developed using the methods described and benchmarked herein were successfully delivered to and expressed in one or more CNS tissues. Further, several NHP capsid variants tested here showed increased delivery to the CNS as compared to the capsid variants currently known and alleged to target the CNS and cross the blood brain barrier (AAV-CAP-B10, AAV-CAP22, and AAV-PhP.22). Further, most of the NHP variants were not observed to have strong liver delivery or expression (see e.g., FIGS. 11O and 11P). Expression in the dorsal root ganglion can lead to significant toxicity. Several NHP variants showed reduced or negligible delivery and/or expression in the dorsal root ganglion (DRG) (see e.g., FIG. 11N).

### Example 8—Optimized CNS Motif Variants

[0539] Directed capsid evolution and benchmarking is previously described in e.g., Examples 1-6. This Example demonstrates optimized capsid inserts specific for CNS in NHPs. Briefly, for these selections a library was screened with a fixed RGD motif (XXXRGDXXXX, where X is any amino acid), as well as a library containing a fixed P-family motif (XXXPXQGTXR (SEQ ID No: 1), where X is any amino acid) in non-human primates and identified the variants that were specific for only the CNS in NHPs. Table 7 provides the resulting top n-mer inserts and/or P motifs specific for CNS.

TABLE 7
Optimized CNS Capsid n-mer inserts and/or
P-motifs

| Capsid Insert Variant | SEQ ID NO: |
|---|---|
| EVGPTQGTVR | 332 |
| DYEPSQGTMR | 333 |
| SVSPGQGTYR | 334 |
| AVTPIQGTIR | 335 |
| ENVPMQGTVR | 336 |
| AASPPQGTMR | 337 |
| DQRPGQGTIR | 338 |
| NVSPQQGTMR | 339 |
| IPIPNQGTIR | 340 |
| STVPAQGTMR | 341 |
| STVPSQGTVR | 342 |
| SPIPSQGTLR | 343 |
| TTMPSQGTIR | 344 |
| SVMPAQGTLR | 345 |
| SIVPVQGTVR | 346 |
| SVTPSQGTLR | 347 |
| AVGPSQGTIR | 348 |
| SINPSQGTIR | 349 |
| AINPTQGTLR | 350 |
| ALLPNQGTVR | 351 |
| ASMPQQGTIR | 352 |
| SNAPAQGTMR | 353 |
| LNVPVQGTVR | 354 |
| QVTPTQGTVR | 355 |
| LVSPAQGTMR | 356 |
| AVTPSQGTIR | 357 |
| VAGPSQGTLR | 358 |
| EKLPSQGTLR | 359 |
| SISPLQGTVR | 360 |
| ESRPLQGTYR | 361 |
| NANPGQGTVR | 362 |
| IPLPSQGTVR | 363 |
| MPMPNQGTVR | 364 |
| ETRPDQGTVR | 365 |
| TEKPMQGTER | 366 |
| GDDPLQGTSR | 367 |
| SISPGQGTLR | 368 |
| EMNPLQGTVR | 369 |
| SAEPGQGTTR | 370 |
| MNVPSQGTDR | 371 |
| ITSPTQGTNR | 372 |
| MLEPTQGTPR | 373 |
| LEPPTQGTGR | 374 |
| QNEPRQGTDR | 375 |
| SMTPVQGTVR | 376 |
| SRAPDQGTIR | 377 |
| NTQPIQGTTR | 378 |
| LSVPLQGTIR | 379 |
| SEAPGQGTVR | 380 |
| GREPGQGTYR | 381 |
| IASPVQGTPR | 382 |
| SAIPPQGTSR | 383 |
| GMLPEQGTPR | 384 |
| WDDPHQGTMR | 385 |
| AIGPGQGTMR | 386 |
| ASVPQQGTVR | 387 |
| SVQPGQGTYR | 388 |
| NAGPSQGTLR | 389 |
| MKVPEQGTMR | 390 |
| TTIPEQGTYR | 391 |
| SAIPGQGTTR | 392 |
| DNGPRQGTLR | 393 |
| TLPPVQGTMR | 394 |
| NTSPMQGTQR | 395 |
| ETSPSQGTYR | 396 |
| SATPAQGTVR | 397 |
| MATPMQGTFR | 398 |
| MNVPTQGTVR | 399 |
| SVLPEQGTMR | 400 |
| STTPIQGTMR | 401 |
| NSDPQQGTVR | 402 |
| SNTPLQGTTR | 403 |
| SDAPQQGTLR | 404 |
| SNAPIQGTMR | 405 |
| NANPGQGTMR | 406 |
| ESMPVQGTHR | 407 |
| VERPLQGTMR | 408 |
| SVSPTQGTMR | 409 |
| VVAPLQGTDR | 410 |
| SVTPLQGTIR | 411 |
| VPNPVQGTPR | 412 |
| GIWPGQGTGR | 413 |
| LPTPIQGTLR | 414 |
| ANEPRQGTVR | 415 |
| TAFPTQGTMR | 416 |
| SSAPNQGTMR | 417 |
| MESPVQGTTR | 418 |
| CTAPGQGTDR | 419 |
| VTNPTQGTYR | 420 |
| SNAPIQGTFR | 421 |
| QSTPGQGTLR | 422 |
| LVKPPQGTDR | 423 |
| AAGPMQGTNR | 424 |
| SSSPNQGTFR | 425 |
| QESPLQGTVR | 426 |
| AASPTQGTLR | 427 |
| FTAPDQGTGR | 428 |
| DNVPNQGTIR | 429 |
| YSMPTQGTVR | 430 |
| SSIPGQGTAR | 431 |
| VTIPAQGTIR | 432 |
| AHMPSQGTDR | 433 |
| YVTPPQGTLR | 434 |
| DGNPAQGTGR | 435 |
| LQNPSQGTSR | 436 |
| LQGPVQGTLR | 437 |
| STNPAQGTLR | 438 |
| LPTPIQGTMR | 439 |
| SVAPTQGTVR | 440 |
| QPSPMQGTVR | 441 |
| MTQPSQGTIR | 442 |
| SAEPNQGTTR | 443 |
| TDTPSQGTVR | 444 |
| LQQPLQGTTR | 445 |
| NTHPAQGTVR | 446 |
| VSAPMQGTMR | 447 |
| SEKPAQGTYR | 448 |
| TSLPTQGTLR | 449 |
| SERPVQGTFR | 450 |
| VLEPSQGTSR | 451 |
| ANAPIQGTIR | 452 |
| NVSPIQGTMR | 453 |
| SVLPEQGTMR | 454 |
| NDRPLQGTMR | 455 |
| VVPPGQGTLR | 456 |
| EPSPNQGTSR | 457 |
| VLLPSQGTVR | 458 |
| GSFPQQGTLR | 459 |
| NTIPVQGTQR | 460 |
| AASPPQGTLR | 461 |
| TAVPSQGTHR | 462 |
| YESPVQGTVR | 463 |
| AALPSQGTLR | 464 |
| SRIPDQGTIR | 465 |
| MPRPDQGTMR | 466 |
| ISTPTQGTLR | 467 |
| VDIPMQGTLR | 468 |
| NMLPTQGTIR | 469 |
| TVLPGQGTIR | 470 |
| TTDPVQGTVR | 471 |
| SVTPVQGTSR | 472 |
| FPLPSQGTVR | 473 |
| EMAPNQGTSR | 474 |
| VDRPSQGTMR | 475 |
| NTEPPQGTDR | 476 |
| MAMPPQGTLR | 477 |
| ATLPSQGTLR | 478 |
| LAIPPQGTSR | 479 |
| TSGPVQGTFR | 480 |
| SSGPGQGTDR | 481 |
| MVTPGQGTMR | 482 |
| EGTPVQGTTR | 483 |
| MPIPSQGTPR | 484 |
| NPLPTQGTSR | 485 |
| SHFPPQGTNR | 486 |
| AVTPTQGTIR | 487 |
| ESGPSQGTSR | 488 |
| MTVPSQGTFR | 489 |
| EAYPTQGTIR | 490 |
| SSTPAQGTFR | 491 |
| DSRPLQGTIR | 492 |
| DNAPLQGTNR | 493 |
| QPIPPQGTMR | 494 |
| ASSPTQGTER | 495 |
| NVSPSQGTVR | 496 |
| IHLPAQGTVR | 497 |
| SSVPAQGTQR | 498 |
| TTGPNQGTLR | 499 |
| ATGPTQGTLR | 500 |
| AATPGQGTYR | 501 |
| AAVPTQGTVR | 502 |
| EGKPEQGTTR | 503 |
| SIAPTQGTIR | 504 |
| DVRPSQGTIR | 505 |
| MLRPEQGTDR | 506 |
| TVSPTQGTTR | 507 |
| KERPEQGTMR | 508 |
| DSSPNQGTYR | 509 |
| SLAPMQGTTR | 510 |
| ELHPTQGTSR | 511 |
| ETGPMQGTVR | 512 |
| VLAPVQGTQR | 513 |
| KEAPDQGTGR | 514 |
| ASEPSQGTQR | 515 |
| IYGPNQGTLR | 516 |
| TERPVQGTFR | 517 |
| GATPLQGTLR | 518 |
| LAGPMQGTIR | 519 |
| EVRPIQGTVR | 520 |
| MANPIQGTVR | 521 |
| TREPQQGTFR | 522 |
| MKDPIQGTYR | 523 |
| LSEPPQGTLR | 524 |
| LMEPRQGTVR | 525 |
| VASPMQGTSR | 526 |
| QTFPNQGTMR | 527 |
| MNRPTQGTER | 528 |
| EVPPSQGTLR | 529 |
| VTGPPQGTYR | 530 |
| SHVPAQGTMR | 531 |
| MVMPVQGTVR | 532 |
| SDKPVQGTMR | 533 |
| SVAPTQGTIR | 534 |
| GTTPDQGTMR | 535 |
| GSEPNQGTYR | 536 |
| GPMPIQGTLR | 537 |
| NQMPMQGTAR | 538 |
| GNTPVQGTVR | 539 |
| SANPLQGTIR | 540 |
| MSFPSQGTHR | 541 |
| NPDPIQGTIR | 542 |
| EMNPVQGTNR | 543 |
| TVLPNQGTVR | 544 |
| VIQPVQGTVR | 545 |
| QTFPEQGTMR | 546 |
| VLTPSQGTTR | 547 |
| NNGPMQGTVR | 548 |
| VETPNQGTHR | 549 |
| SLVPNQGTVR | 550 |
| DSAPHQGTYR | 551 |
| DHGPSQGTSR | 552 |
| AAMPGQGTVR | 553 |
| ISSPGQGTDR | 554 |
| NVSPSQGTLR | 555 |
| SSIPIQGTSR | 556 |
| GSVPGQGTTR | 557 |
| MREPSQGTSR | 558 |
| TDQPSQGTVR | 559 |
| MMQPVQGTSR | 560 |
| SFQPGQGTLR | 561 |
| MNAPSQGTTR | 562 |
| NEVPTQGTAR | 563 |
| VSGPEQGTSR | 564 |
| GYEPAQGTMR | 565 |
| SLIPDQGTIR | 566 |
| DYGPSQGTVR | 567 |
| TELPMQGTVR | 568 |
| SYMPLQGTVR | 569 |
| DYKPNQGTVR | 570 |
| DTKPNQGTVR | 571 |
| MNTPAQGTLR | 572 |
| VMNPEQGTAR | 573 |
| EILPGQGTLR | 574 |
| MPSPAQGTIR | 575 |
| NVIPEQGTNR | 576 |
| QMEPHQGTTR | 577 |
| FVVPDQGTNR | 578 |
| ENNPGQGTTR | 579 |
| NWKPEQGTDR | 580 |
| SVSPNQGTIR | 581 |
| DPSPLQGTDR | 582 |

### Example 9—Comparison of the EVGPTQGTVR (SEQ ID NO: 332) Capsid Insert Variant with AAV9 in NHP Tissues

[0540] This Example compares the transduction and vector genome distribution of the top hit (EVGPTQGTVR (SEQ ID NO: 332, Table 7) from the screen discussed in Example 8 and AAV9.

[0541] FIGS. 12A-12C show a comparison of transduction between the EVGPTQGTVR (SEQ ID NO: 332, Table 7) capsid insert variant with AAV9 in NHP tissues. FIG. 12A shows transgene expression from the engineered EVG capsid containing the EVGPTQGTVR (SEQ ID NO: 332) capsid insert variant compared to AAV9 in the primate cerebrum. FIG. 12B shows transgene expression from the engineered EVG capsid containing the EVGPTQGTVR (SEQ ID NO: 332) capsid insert variant compared to AAV9 in the primate nervous system. FIG. 12C shows transgene expression from the engineered EVG capsid containing the EVGPTQGTVR (SEQ ID NO: 332) capsid insert variant compared to AAV9 in various primate muscles and organs.

[0542] FIGS. 13A-13C show a comparison of the vector genome biodistribution between the EVGPTQGTVR (SEQ ID NO: 332) capsid insert variant with AAV9 in NHP tissues. FIG. 13A shows the vector genome biodistribution from the engineered EVG capsid containing the EVGPTQGTVR (SEQ ID NO: 332) capsid insert variant compared to AAV9 in the primate cerebrum. FIG. 13B shows the vector genome biodistribution from the engineered EVG capsid containing the EVGPTQGTVR (SEQ ID NO: 332) capsid insert variant compared to AAV9 in the primate nervous system. FIG. 13C shows the vector genome biodistribution from the engineered EVG capsid containing the EVGPTQGTVR (SEQ ID NO: 332) capsid insert variant compared to AAV9 in various primate muscles and organs.

### Example 10

### Introduction

[0543] Recombinant adeno-associated virus (rAAV) vectors are the vehicle of choice for gene therapy applications in the central nervous system (CNS) due to their low immunogenicity and ability to facilitate long-term gene expression in both dividing and non-dividing cells.¹⁻⁶ Clinical and preclinical studies of rAAV-based therapies with naturally occurring AAV serotypes have shown promise in the treatment of a variety of CNS disorders.^{1,5,7-11} However, the efficacy of rAAVs in transducing the CNS has been limited by the protective effect of the blood-brain barrier (BBB) and the broad tissue tropism of naturally occurring AAV serotypes, which together result in inefficient transduction of target cell populations in the CNS.^{1,2,12} Direct administration of rAAVs into the CNS, such as via intrathecal, intracisternal, or intraparenchymal injection, is a commonly employed strategy to bypass the BBB.^{1,2,5,13} However, these delivery routes generally do not result in widespread and uniform transduction of the CNS and can be associated with considerable surgical risk.^{2,13}

[0544] The discovery that the AAV9 serotype can cross the BBB has introduced the possibility of utilizing noninvasive systemic administration of rAAVs via the vascular system to facilitate widespread transduction across the CNS.^{1,2,13,14} Intravenous (IV) infusion has been employed in a number of clinical trials of CNS-targeted rAAV therapies^{1,11} and is the administration route of choice for an FDA-approved treatment for spinal muscular atrophy.⁷ However, systemic administration of naturally occurring AAV serotypes is complicated by sequestration of viral particles in the liver and the protective effect of the BBB, both of which limit rAAV bioavailability in the CNS.^{1,2,12,15,16} Achieving therapeutic efficacy in the CNS with systemic administration of rAAVs therefore requires large doses, sometimes exceeding 1E+14 vector genomes per kilogram body mass (vg/kg).^{1,2,5,13} In addition to posing significant manufacturing challenges, high dose rAAV therapy compounds the safety risk associated with an immune response in the liver, a phenomenon that has been observed in both clinical and preclinical studies.^{1,2,15,17-20}

[0545] Engineering AAV capsids that display both enhanced transduction of the CNS and reduced transduction in peripheral organs following systemic administration will facilitate the development of CNS-targeted therapies with improved safety and efficacy at a reduced dose. Previous studies have successfully applied directed evolution techniques to generate novel AAV capsids with CNS-tropic properties in vivo,²¹⁻²⁵ though translating these findings from mouse models to nonhuman primates (NHPs) has proved challenging and has complicated efforts to develop capsids with therapeutic potential in humans. A directed evolution strategy performed in Cre-transgenic C57BL/6J mice using the CREATE (Cre recombination-based AAV targeted evolution) method yielded potent CNS-tropic variants such as PHP.B and PHP.eB.^{21,22} However, the CNS-tropic properties of these variants translate poorly even to other mouse strains, and studies assessing intravenous administration of PHP.B in marmosets found that it failed to outperform AAV9 in CNS transduction.²⁶⁻²⁹ These findings cast doubt on the applicability of such vectors to human gene therapy and highlight the need to evaluate novel capsids in NHPs.

[0546] Recent studies have attempted to find less strain-specific CNS-tropic capsids using a multiplexed CREATE strategy in which directed evolution is performed across multiple mouse strains.²³ Two PHP.eB-related variants identified in these efforts, AAV.CAP-B10 and AAV.CAP-B22, were later found to have improved CNS transduction in the marmoset brain compared to AAV9.²⁵ Though variants demonstrating efficacy in marmosets likely hold greater therapeutic potential than those only capable of transducing the mouse brain, marmosets are much smaller and more evolutionarily distant from humans than are other common NHP models such as macaques. Given that positive results for certain engineered rAAVs in mice do not necessarily translate to NHPs^{25,26,29} and the extensibility of transduction data in marmosets to other NHPs is unknown, it is of utmost importance to assess the performance of novel rAAVs in appropriate animal models in order to identify candidate vectors for human gene therapy applications.

[0547] The unrealized potential of systemically administered rAAVs with CNS-tropic engineered capsids combined with the challenges in translating these capsids to NHPs serve as motivation for this work. In contrast to previous attempts to identify engineered capsids with therapeutic potential in the CNS, which typically involve selecting CNS-tropic capsids in mice, in this Example Applicant used an mRNA-based directed evolution strategy in both mice and cynomolgus macaques. This Example identifies capsids that (i) retain CNS-tropic behavior across multiple animal models such that their properties may be conserved throughout the lineage; and (ii) have CNS-tropic behavior in NHP models that are the closest practical evolutionary neighbors to humans. In both cases, Applicant seeks to identify capsids with the highest degree of translational and therapeutic potential in humans.

### Results

In Vivo mRNA-Based Selection for CNS-Tropic AAVs.

[0548] Applicant developed AAV vectors with CNS-tropic properties in mice using the previously described in vivo directed evolution strategy DELIVER (directed evolution of AAV capsids leveraging in vivo expression of transgene RNA).³⁰ As the success of capsid variants in DELIVER is based on transgene mRNA expression, it preferentially selects for variants that are able to transcribe in addition to deliver genetic cargo. Applicant first generated AAV9-based capsid libraries with a random 7-mer peptide inserted in the VR-VIII hypervariable region between residues Q588 and A589, a location known to permit exposure of the peptide on the capsid surface.^{31,32} The capsid library construct was flanked by inverted terminal repeats (ITRs), thereby eliciting self-packaging of the cap gene; that is, each capsid variant encodes its own coding sequence as a transgene. To introduce selective pressure favoring capsid variants that preferentially transduce neurons, we placed the transgene under the control of the neuron-specific human synapsin 1 promoter (hSyn) (FIG. 14A).

[0549] Applicant performed two rounds of in vivo selection in parallel in C57BL6J and BALB/cJ mice and cynomolgus macaques using expression of transgene mRNA as the selection criteria. The first round of selection included a starting library of capsids with random 7-mer inserts. To create a library for our second round of selection, Applicant identified the top 30,000 most enriched capsid variants in the brain, drawing 10,000 high-scoring variants from mice and 20,000 from macaques. Applicant next introduced a synonymous codon control where each of the 30,000 top peptides were encoded both by their experimentally recovered DNA sequence and by a synonymous DNA codon sequence (FIG. 14B). Applicant also generated a complementary library where the two residues upstream of the 7-mer peptide insert were changed from AQ to DG, given that this is a modification thought to be responsible for the enhanced CNS-tropic properties of the engineered variant PHP.eB in mice.²²

[0550] For the second round of selection in mice, we injected both the AQ and DG second-round libraries into separate sets of C57BL/6J and BALB/cJ mice. The identities of the most successful variants in mice differed depending on the prefix to the 7-mer insert (FIG. 15A-15B and Table 8). Of the variants with the wild-type AQ prefix, the four most enriched DNA sequences averaged across both mouse strains—corresponding to two pairs of synonymous peptide sequences—encoded two highly similar variants. These two variants; AQRSVGSVY (SEQ ID NO: 8587) and AQKTVGTVY (SEQ ID NO: 8588); are henceforth referred to as MDV1A and MDV1B (Mouse Double Valine), respectively (FIG. 15A), and are predicted to have similar but distinct secondary structure in the VR-VIII loop region (FIG. 15C). Of the variants with the modified PHP.eB-like DG prefix, the two most enriched DNA sequences are synonymous and encode the same peptide, DGREQQKLW (SEQ ID NO: 8589) (FIG. 17B). Applicant also recovered the sequences encoding PHP.B and PHP.eB from C57BL/6J but not BALB/cJ mice (FIG. 15B and Table 9), confirming previous findings that the CNS-tropic properties of PHP.B and PHP.eB are limited to C57BL/6J mice²⁶⁻²⁹ and further validating the DELIVER selection strategy.

[0551] Applicant chose MDV1A for further characterization in mice based on its superior performance in both the C57BL/6J and BALB/cJ strains. Applicant injected adult C57BL/6J and BALB/cJ mice of both sexes with 1E+12 vg of AAV9- or MDV1A-CMV-EGFP. Two weeks after administration of the vector, Applicant assessed vector genome delivery and transgene expression in the brain and spinal cord. MDV1A significantly outperformed AAV9 in both transgene delivery and expression in the brain of all groups of mice, demonstrating between a 25-fold and 160-fold improvement in transgene expression in the brain of male BALB/cJ and female C57BL/6J mice, respectively (FIG. 15D-15E). In the spinal cord, MDV1A significantly outperformed AAV9 in transgene delivery and expression in three of the four groups of mice, with between a 43-fold and 99-fold improvement in transgene expression in male BALB/cJ and female BALB/cJ mice, respectively (FIG. 15D-15E). In the spinal cord of female C57BL6J mice, there was a 24-fold performance difference between the two vectors that did not reach the threshold of statistical significance due to high variability in the data (FIG. 15D-15E). Immunostaining of sagittal mouse brain sections revealed greater EGFP expression from MDV1A than AAV9, with relatively uniform distribution of EGFP throughout the brain (FIG. 15F).

[0552] In order to select for variants with CNS-tropic activity in primates, Applicant also performed a second round of selection in three cynomolgus macaques. Applicant used the same AQ library as in the second round of selection in mice, which included variants identified in the first round in both mice and macaques. Applicant found that the variants most enriched in the macaque brain differed greatly from those identified in mice (FIG. 18A-18B). Both with and without correcting for the synonymous DNA codons, the ten most enriched variants across the entire macaque CNS were dominated by a motif typified by a proline in position 1, the string QGT in positions 3-5, and an arginine in position 7. Applicant also identified variants enriched in specific regions such as the cerebellum and spinal cord, though unlike in the CNS-wide results, these tissue-specific analyses did not converge on a single dominant motif (FIG. 19A-19B).

[0553] Applicant sought to more systematically identify sets of common motifs by performing k-medoids clustering on the top 1000 macaque variants using a dissimilarity metric based on pairwise substitution scores between 7-mer peptides. The cluster represented by the medoid sequence PTQGTLR (SEQ ID NO: 206) contained 19 variants, including 9 ranked in the top 100 sequences and 6 ranked in the top 10 (FIG. 16C). Many variants in this cluster—including most of the highest-performing variants—are broadly described by the motif PX₁QGTX₂R (SEQ ID NO: 317), where X₁ is a polar uncharged residue and X₂ is a nonpolar residue. Applicant defines the canonical Proline Arginine Loop (PAL) family of variants based on this motif, though more divergent PAL-like variants within the same cluster may share structural and functional properties with the canonical PAL variants. Computational modeling of the VR-VIII loop with the 7-mer insert predicted that canonical PAL variants share a nearly identical backbone conformation. However, even single-residue deviations from this core motif, such as the introduction of a proline at the third position in the sixth-ranked sequence PTPGTLR (SEQ ID NO: 4593), may considerably alter the backbone conformation (FIG. 16D). k-medoids identified a number of additional clusters containing high-performing variants with conserved structural properties (FIG. 19C), but many variants were sorted into singleton clusters or small clusters with only two or three variants (Table 9).

TABLE 8
Mouse AQ

| | | SEQ | | SEQ | | | |
|---|---|---|---|---|---|---|---|
| | | ID | | ID | Combined | BALB/cJ | C57BL/6J |
| Rank | Peptide | NO: | Encoding Sequence | NO: | score | score | score |
| 1 | RSVGSVY | 583 | CGGAGTGTTGGGAGTGTGTAT | 584 | 46000 | 24000 | 22000 |
| 2 | KTVGTVY | 585 | AAGACTGTGGGTACTGTTTAT | 586 | 45980 | 24000 | 21980 |
| 3 | KTVGTVY | 587 | AAAACCGTCGGCACAGTGTAC | 588 | 45181 | 24000 | 21181 |
| 4 | RSVGSVY | 589 | CGATCCGTCGGAAGCGTTTAC | 590 | 44994 | 22000 | 22994 |
| 5 | RYLGDAS | 591 | CGTTACTTAGGAGACGCCTCT | 592 | 40592 | 22245 | 18347 |
| 6 | WVLPSGG | 593 | TGGGTGCTACCATCTGGCGGC | 594 | 37597 | 20094 | 17504 |
| 7 | WVLPSGG | 595 | TGGGTTCTGCCTAGTGGTGGG | 596 | 34140 | 18433 | 15707 |
| 8 | VTVGSIY | 597 | GTAACAGTGGGCAGCATCTAC | 598 | 32968 | 19818 | 13150 |
| 9 | VRGSSIL | 599 | GTGCGTGGGTCGTCGATTCTT | 600 | 32330 | 19458 | 12872 |
| 10 | RYLGDAS | 601 | CGGTATTTGGGGGATGCTTCG | 602 | 32329 | 19921 | 12408 |
| 11 | VIQAMKL | 603 | GTGATTCAGGCTATGAAGTTG | 604 | 32127 | 17837 | 14290 |
| 12 | LTYGMAQ | 605 | CTGACTTATGGTATGGCTCAG | 606 | 31956 | 13152 | 18805 |
| 13 | LRIGLSQ | 607 | CTTCGGATTGGGCTGTCGCAG | 608 | 31710 | 13287 | 18423 |
| 14 | RYSGDAS | 609 | CGGTACTCAGGAGACGCTTCT | 610 | 31198 | 24000 | 7198 |
| 15 | RHHGDAA | 611 | CGGCATCATGGTGATGCGGCG | 612 | 30406 | 16501 | 13905 |
| 16 | VNYSVAL | 613 | GTGAACTACAGTGTCGCTCTA | 614 | 29969 | 19408 | 10561 |
| 17 | RHIADAS | 615 | CGTCATATTGCTGATGCTAGT | 616 | 29554 | 19310 | 10244 |
| 18 | RYLGDAT | 617 | CGGTATTTGGGGGATGCTACG | 618 | 29527 | 16761 | 12767 |
| 19 | QRVGFAQ | 619 | CAACGAGTCGGGTTCGCACAA | 620 | 29454 | 9203 | 20251 |
| 20 | RYSGDSV | 621 | AGGTACTCAGGCGACTCAGTC | 622 | 28960 | 17675 | 11286 |
| 21 | RHIADAS | 623 | AGACACATAGCGGACGCGTCG | 624 | 28595 | 15266 | 13329 |
| 22 | IAHGYST | 625 | ATTGCTCATGGGTATTCGACT | 626 | 28216 | 16364 | 11851 |
| 23 | VNYSVAL | 627 | GTTAATTATTCGGTGGCGCTT | 628 | 27811 | 19586 | 8225 |
| 24 | WTLESGH | 629 | TGGACCTTAGAAAGCGGGCAC | 630 | 27471 | 10055 | 17416 |
| 25 | RYSGDSV | 631 | CGTTATTCGGGGGATTCGGTT | 632 | 27410 | 14916 | 12493 |
| 26 | WTLESGH | 633 | TGGACTCTGGAGTCTGGTCAT | 634 | 27194 | 11189 | 16004 |
| 27 | VTVGSIY | 635 | GTTACTGTTGGGTCTATTTAT | 636 | 27069 | 16971 | 10098 |
| 28 | RYLGDAT | 637 | CGATACCTAGGTGACGCAACC | 638 | 26494 | 15312 | 11182 |
| 29 | RYSGDAS | 639 | AGGTATTCGGGTGATGCGAGT | 640 | 25873 | 20351 | 5522 |
| 30 | GDYSMIV | 641 | GGAGACTACTCTATGATAGTC | 642 | 24847 | 11475 | 13372 |
| 31 | GENSARW | 643 | GGGGAAAACTCTGCCAGATGG | 644 | 24447 | 13369 | 11078 |
| 32 | LAVGQKW | 645 | TTGGCGGTGGGGCAGAAGTGG | 646 | 24445 | 15404 | 9040 |
| 33 | SLDKPFK | 647 | AGTTTGGATAAGCCTTTTAAG | 648 | 24000 | 0 | 24000 |
| 34 | TLAVPFK | 649 | ACTTTGGCGGTGCCTTTTAAG | 650 | 24000 | 0 | 24000 |
| 35 | SLDKPFK | 651 | AGCTTAGACAAACCATTCAAA | 652 | 24000 | 0 | 24000 |
| 36 | RHHGDAA | 653 | AGACACCACGGGGACGCCGCA | 654 | 23998 | 13808 | 10190 |
| 37 | VKLGYSQ | 655 | GTGAAGCTTGGGTATTCGCAG | 656 | 23912 | 11914 | 11998 |
| 38 | GDYSMIV | 657 | GGGGATTATTCGATGATTGTG | 658 | 23621 | 12465 | 11156 |
| 39 | VRGSSIL | 659 | GTAAGAGGTTCCAGCATCCTA | 660 | 23580 | 16294 | 7286 |
| 40 | EAGSARW | 661 | GAAGCAGGTTCCGCTCGATGG | 662 | 23477 | 8257 | 15220 |
| 41 | EAGSARW | 663 | GAGGCGGGGAGTGCGCGGTGG | 664 | 22692 | 10133 | 12559 |
| 42 | QRVGFAQ | 665 | CAGAGGGTGGGTTTTGCGCAG | 666 | 22222 | 8003 | 14219 |
| 43 | WAISDGY | 667 | TGGGCAATCTCTGACGGCTAC | 668 | 21970 | 7625 | 14345 |
| 44 | LTYGMAQ | 669 | CTTACGTACGGGATGGCACAA | 670 | 21785 | 7103 | 14682 |
| 45 | RGPGLSQ | 671 | CGAGGCCCAGGCCTTAGCCAA | 672 | 21738 | 14881 | 6857 |
| 46 | SVSKPFL | 673 | AGTGTGAGTAAGCCTTTTTTG | 674 | 21352 | 0 | 21352 |
| 47 | LRIGLSQ | 675 | CTACGCATAGGCCTAAGCCAA | 676 | 19761 | 5023 | 14738 |
| 48 | RGPGLSQ | 677 | CGGGGTCCTGGGCTGTCTCAG | 678 | 19667 | 12307 | 7360 |
| 49 | IAHGYST | 679 | ATCGCCCACGGATACAGCACA | 680 | 19631 | 13047 | 6584 |
| 50 | RYVGESS | 681 | AGGTATGTGGGGGAGTCTTCG | 682 | 19630 | 8917 | 10713 |
| 51 | VIQAMKL | 683 | GTTATCCAAGCGATGAAACTA | 684 | 19442 | 12014 | 7428 |
| 52 | GPTMLFK | 685 | GGCCCAACAATGTTATTCAAA | 686 | 19036 | 0 | 19036 |
| 53 | GENSARW | 687 | GGTGAGAATAGTGCTCGGTGG | 688 | 16736 | 6244 | 10493 |
| 54 | LAVGQKW | 689 | CTCGCTGTCGGACAAAAATGG | 690 | 15886 | 9340 | 6546 |
| 55 | FTLTTPK | 691 | TTTACGTTGACGACGCCTAAG | 692 | 15607 | 254 | 15352 |
| 56 | EDLLRLR | 693 | GAGGATCTTTTGCGTCTTAGG | 694 | 14920 | 9436 | 5484 |
| 57 | LNYSVSL | 695 | CTGAACTACAGTGTATCCCTA | 696 | 14608 | 10933 | 3675 |
| 58 | WAISDGY | 697 | TGGGCGATTAGTGATGGGTAT | 698 | 14342 | 4386 | 9955 |
| 59 | GPTMLFK | 699 | GGTCCGACGATGTTGTTTAAG | 700 | 14140 | 0 | 14140 |
| 60 | RYVGESS | 701 | AGATACGTAGGTGAAAGTTCT | 702 | 13185 | 7591 | 5594 |
| 61 | PIIEHAV | 703 | CCGATTATTGAGCATGCGGTG | 704 | 12837 | 2394 | 10443 |
| 62 | SLSTPFR | 705 | TCTCTTTCTACGCCTTTTCGT | 706 | 12297 | 0 | 12297 |
| 63 | VKLGYSQ | 707 | GTTAAATTGGGTTACTCCCAA | 708 | 11170 | 6081 | 5089 |
| 64 | LNYSVSL | 709 | TTGAATTATTCTGTGAGTTTG | 710 | 11132 | 7243 | 3889 |
| 65 | LGTYELD | 711 | CTTGGGACTTATGAGCTTGAT | 712 | 11116 | 0 | 11116 |
| 66 | PIIEHAV | 713 | CCCATAATAGAACACGCAGTA | 714 | 11100 | 2000 | 9100 |
| 67 | RYISDSA | 715 | CGATACATAAGTGACTCCGCT | 716 | 10788 | 2084 | 8703 |
| 68 | WSTSSGF | 717 | TGGAGTACATCATCGGGATTC | 718 | 10614 | 628 | 9985 |
| 69 | WSLGSGH | 719 | TGGTCACTAGGAAGTGGTCAC | 720 | 10498 | 1235 | 9263 |
| 70 | WSQSSGY | 721 | TGGAGTCAGTCTAGTGGTTAT | 722 | 10258 | 728 | 9529 |
| 71 | EDLLRLR | 723 | GAAGACTTGCTGAGACTGCGA | 724 | 9754 | 6426 | 3328 |
| 72 | TEKLPFR | 725 | ACTGAGAAGCTGCCTTTTCGG | 726 | 9501 | 0 | 9501 |
| 73 | IMLGYST | 727 | ATTATGTTGGGGTATTCGACT | 728 | 9404 | 685 | 8718 |
| 74 | SLSTPFR | 729 | AGCCTCAGCACCCCCTTCCGC | 730 | 9222 | 0 | 9222 |
| 75 | ASNPGRW | 731 | GCGAGTAACCCTGGAAGGTGG | 732 | 9173 | 2435 | 6738 |
| 76 | WSLGSGH | 733 | TGGTCGTTGGGTTCTGGGCAT | 734 | 8761 | 0 | 8761 |
| 77 | NLIKPFL | 735 | AACCTTATAAAACCGTTCCTC | 736 | 8707 | 0 | 8707 |
| 78 | HVENWHI | 737 | CATGTGGAGAATTGGCATATT | 738 | 8680 | 634 | 8046 |
| 79 | WSQSSGY | 739 | TGGTCCCAAAGCTCTGGGTAC | 740 | 8560 | 590 | 7970 |
| 80 | WSTSSGF | 741 | TGGTCGACTAGTAGTGGTTTT | 742 | 8268 | 0 | 8268 |
| 81 | GKSPGVW | 743 | GGCAAATCCCCTGGAGTATGG | 744 | 7685 | 7236 | 448 |
| 82 | TEKLPFR | 745 | ACGGAAAAACTTCCGTTCAGG | 746 | 7240 | 0 | 7240 |
| 83 | SLVTSST | 747 | TCGCTTGTTACTTCTAGTACG | 748 | 6782 | 2782 | 4000 |
| 84 | LLYGYSS | 749 | CTTCTGTATGGTTATTCGAGT | 750 | 6779 | 334 | 6444 |
| 85 | VAGSSIL | 751 | GTTGCGGGTTCGTCGATTCTG | 752 | 6520 | 0 | 6520 |
| 86 | GLNERVA | 753 | GGTCTGAATGAGCGTGTGGCG | 754 | 6410 | 2000 | 4410 |
| 87 | LGTYELD | 755 | TTAGGCACATACGAATTGGAC | 756 | 6394 | 0 | 6394 |
| 88 | KNRRHSV | 757 | AAAAACCGTCGGCACAGTGTA | 758 | 6312 | 6190 | 122 |
| 89 | YTLSQGW | 759 | TATACTTTGTCGCAGGGTTGG | 760 | 6310 | 1912 | 4398 |
| 90 | SANPVVT | 761 | TCTGCGAATCCGGTTGTGACG | 762 | 5937 | 4778 | 1159 |
| 91 | VAGSSIL | 763 | GTAGCTGGGAGCAGCATCTTG | 764 | 5609 | 894 | 4716 |
| 92 | NLIKPFL | 765 | AATTTGATTAAGCCTTTTCTT | 766 | 5597 | 0 | 5597 |
| 93 | GGTSSGH | 767 | GGGGGTACGAGTAGTGGTCAT | 768 | 5462 | 4092 | 1370 |
| 94 | VLESNPR | 769 | GTGCTTGAGTCGAATCCGCGG | 770 | 5399 | 2617 | 2782 |
| 95 | WADSKDQ | 771 | TGGGCTGATAGTAAGGATCAG | 772 | 5374 | 2986 | 2388 |
| 96 | VDHGGVV | 773 | GTGGATCATGGTGGTGTGGTT | 774 | 5342 | 4000 | 1342 |
| 97 | ASTDSKT | 775 | GCTAGTACTGATTCTAAGACG | 776 | 5285 | 5285 | 0 |
| 98 | KGASVTL | 777 | AAGGGGGCTAGTGTTACGCTT | 778 | 5236 | 4000 | 1236 |
| 99 | SNVALTG | 779 | AGCAACGTTGCACTGACCGGC | 780 | 5235 | 2000 | 3235 |
| 100 | VIASNEH | 781 | GTGATTGCTTCTAATGAGCAT | 782 | 5109 | 3564 | 1545 |
| 101 | MSVGQSW | 783 | ATGTCGGTTGGGCAGTCGTGG | 784 | 5098 | 1046 | 4052 |
| 102 | LSNGQGP | 785 | TTGAGTAATGGTCAGGGTCCT | 786 | 5071 | 4076 | 996 |
| 103 | PVTDSKM | 787 | CCAGTAACTGACTCAAAAATG | 788 | 5068 | 1646 | 3422 |
| 104 | AADSSGR | 789 | GCGGCGGATAGTTCTGGGCGG | 790 | 4995 | 4520 | 475 |
| 105 | ANSHTNS | 791 | GCAAACAGTCACACCAACTCT | 792 | 4935 | 3542 | 1393 |
| 106 | VGANAVA | 793 | GTTGGTGCTAATGCTGTTGCT | 794 | 4872 | 3393 | 1479 |
| 107 | HVENWHI | 795 | CACGTTGAAAACTGGCACATC | 796 | 4865 | 0 | 4864 |
| 108 | KVDQSLA | 797 | AAAGTAGACCAATCACTTGCA | 798 | 4796 | 4796 | 0 |
| 109 | SGEALRL | 799 | TCAGGTGAAGCACTACGGCTA | 800 | 4788 | 971 | 3817 |
| 110 | VPSSTER | 801 | GTTCCGAGTTCTACTGAGCGG | 802 | 4782 | 2664 | 2118 |
| 111 | VVQVNGR | 803 | GTCGTGCAAGTGAACGGACGC | 804 | 4738 | 4415 | 323 |
| 112 | ASNPGRW | 805 | GCTTCGAATCCGGGTCGGTGG | 806 | 4729 | 3678 | 1051 |
| 113 | HNGQVGV | 807 | CACAACGGACAAGTGGGAGTC | 808 | 4705 | 2736 | 1968 |
| 114 | SLAITER | 809 | AGTTTGGCGATTACTGAGCGG | 810 | 4664 | 4000 | 664 |
| 115 | SSAGTSA | 811 | AGTTCGGCGGGTACTTCGGCG | 812 | 4632 | 2000 | 2632 |
| 116 | SVDNRDS | 813 | AGTGTGGACAACAGAGACAGT | 814 | 4614 | 2614 | 2000 |
| 117 | VGQTTTL | 815 | GTTGGCCAAACCACAACATTG | 816 | 4612 | 4428 | 184 |
| 118 | GQVQMTS | 817 | GGTCAGGTGCAGATGACTTCT | 818 | 4572 | 3903 | 669 |
| 119 | GMHVVQA | 819 | GGAATGCACGTCGTCCAAGCA | 820 | 4554 | 0 | 4554 |
| 120 | VGVPLGR | 821 | GTTGGGGTTCCCCTAGGGAGA | 822 | 4548 | 0 | 4548 |
| 121 | KESTLST | 823 | AAGGAGTCTACTCTGAGTACG | 824 | 4541 | 1579 | 2962 |
| 122 | RETVGST | 825 | CGCGAAACCGTAGGCAGTACT | 826 | 4537 | 537 | 4000 |
| 123 | GNGSTSL | 827 | GGTAACGGAAGCACATCGCTA | 828 | 4511 | 438 | 4073 |
| 124 | VDSTISI | 829 | GGTAACGGAAGCACATCGCTA | 830 | 4497 | 4391 | 106 |
| 125 | ASTATIR | 831 | GCGTCTACTGCTACTATTCGG | 832 | 4484 | 4205 | 279 |
| 126 | RSHDSET | 833 | AGGAGTCATGATTCTGAGACT | 834 | 4473 | 0 | 4473 |
| 127 | FGSQMGA | 835 | TTTGGGTCTCAGATGGGGGCG | 836 | 4454 | 4303 | 151 |
| 128 | SVTDVKL | 837 | TCTGTTACTGATGTTAAGCTT | 838 | 4449 | 2449 | 2000 |
| 129 | SHVSDSK | 839 | AGCCACGTATCCGACTCCAAA | 840 | 4446 | 0 | 4446 |
| 130 | KLAPDGT | 841 | AAACTTGCTCCCGACGGAACG | 842 | 4429 | 4000 | 429 |
| 131 | YLVGYQM | 843 | TACCTAGTGGGGTACCAAATG | 844 | 4419 | 899 | 3520 |
| 132 | QDKSTYK | 845 | CAGGATAAGTCGACGTATAAG | 846 | 4396 | 2495 | 1901 |
| 133 | PGGESRG | 847 | CCCGGAGGCGAAAGCCGAGGC | 848 | 4395 | 2000 | 2395 |
| 134 | LTGSVQL | 849 | CTTACGGGTTCGGTTCAGCTT | 850 | 4386 | 1851 | 2535 |
| 135 | SGETLRL | 851 | AGTGGCGAAACCCTACGTCTC | 852 | 4385 | 4000 | 385 |
| 136 | PSVSTLS | 853 | CCTAGTGTTTCTACGCTTAGT | 854 | 4380 | 2380 | 2000 |
| 137 | PGTVNTH | 855 | CCTGGTACTGTTAATACGCAT | 856 | 4354 | 354 | 4000 |
| 138 | PSQGMTS | 857 | CCATCCCAAGGAATGACATCC | 858 | 4340 | 4163 | 177 |
| 139 | AGVLNTL | 859 | GCGGGGGTGCTGAATACTTTG | 860 | 4329 | 2000 | 2329 |
| 140 | KNHGVDP | 861 | AAAAACCACGGAGTAGACCCC | 862 | 4315 | 4017 | 298 |
| 141 | GLMTNAK | 863 | GGGCTGATGACGAATGCGAAG | 864 | 4303 | 2000 | 2303 |
| 142 | MNGVHVL | 865 | ATGAACGGAGTCCACGTACTT | 866 | 4301 | 1871 | 2430 |
| 143 | TDVHSTS | 867 | ACGGATGTGCATTCGACTTCG | 868 | 4296 | 2000 | 2296 |
| 144 | IMLGYST | 869 | ATCATGCTGGGTTACTCTACG | 870 | 4268 | 284 | 3984 |
| 145 | PAEHYQA | 871 | CCGGCTGAGCATTATCAGGCT | 872 | 4259 | 4259 | 0 |
| 146 | GQTLAES | 873 | GGGCAAACATTAGCGGAATCG | 874 | 4245 | 956 | 3289 |
| 147 | SSVQGIL | 875 | TCGAGTGTTCAGGGGATTCTG | 876 | 4232 | 2232 | 2000 |
| 148 | ALSQIEV | 877 | GCGCTGTCCCAAATAGAAGTC | 878 | 4230 | 686 | 3544 |
| 149 | VTTVTPV | 879 | GTCACGACTGTGACCCCCGTT | 880 | 4223 | 1622 | 2601 |
| 150 | ATVTGAD | 881 | GCTACGGTGACCGGAGCAGAC | 882 | 4207 | 4207 | 0 |
| 151 | VSGGDYS | 883 | GTCTCTGGAGGCGACTACTCA | 884 | 4202 | 2639 | 1563 |
| 152 | KSQSEDV | 885 | AAGAGTCAGTCTGAGGATGTG | 886 | 4202 | 2000 | 2202 |
| 153 | LLYGYSS | 887 | CTCCTCTACGGATACTCTTCA | 888 | 4198 | 0 | 4198 |
| 154 | MVQSGLT | 889 | ATGGTTCAGTCGGGGTTGACG | 890 | 4198 | 2000 | 2198 |
| 155 | EQYLGSP | 891 | GAGCAGTATCTGGGTTCTCCG | 892 | 4196 | 2000 | 2196 |
| 156 | SGANLSN | 893 | TCGGGGGCTAACCTCTCGAAC | 894 | 4181 | 3761 | 420 |
| 157 | ALVQNGV | 895 | GCTTTGGTGCAGAATGGTGTT | 896 | 4165 | 2724 | 1441 |
| 158 | SDQQKVW | 897 | AGTGATCAGCAGAAGGTTTGG | 898 | 4165 | 3760 | 405 |
| 159 | NGSDTPK | 899 | AACGGAAGCGACACACCGAAA | 900 | 4163 | 449 | 3714 |
| 160 | SDLTSYV | 901 | TCCGACCTCACCAGTTACGTT | 902 | 4160 | 2553 | 1607 |
| 161 | GAADRQI | 903 | GGTGCGGCTGATAGGCAGATT | 904 | 4143 | 0 | 4143 |
| 162 | AVGHVSG | 905 | GCCGTAGGACACGTTTCTGGT | 906 | 4143 | 2000 | 2143 |
| 163 | RYISDSA | 907 | AGGTATATTTCGGATTCTGCG | 908 | 4142 | 3503 | 639 |
| 164 | AQGTISR | 909 | GCGCAGGGGACGATTTCGCGT | 910 | 4136 | 2550 | 1586 |
| 165 | MANMLSD | 911 | ATGGCGAACATGTTATCTGAC | 912 | 4132 | 236 | 3896 |
| 166 | VMRDKDE | 913 | GTGATGCGTGATAAGGATGAG | 914 | 4126 | 2000 | 2126 |
| 167 | GGKGEGP | 915 | GGTGGGAAGGGTGAGGGTCCG | 916 | 4101 | 1032 | 3069 |
| 168 | SDVVVTH | 917 | TCTGATGTTGTTGTTACTCAT | 918 | 4088 | 3762 | 326 |
| 169 | GVLTTVT | 919 | GGGGTTCTTACTACGGTGACT | 920 | 4086 | 0 | 4086 |
| 170 | NDGPREQ | 921 | AATGATGGTCCGAGGGAGCAG | 922 | 4043 | 3837 | 206 |
| 171 | PTQGVSM | 923 | CCAACCCAAGGAGTTTCGATG | 924 | 4035 | 1735 | 2300 |
| 172 | NMGVVQL | 925 | AACATGGGCGTCGTGCAATTG | 926 | 4032 | 0 | 4032 |
| 173 | AGGGDPR | 927 | GCGGGGGGTGGGGATCCGAGG | 928 | 4031 | 2780 | 1250 |
| 174 | AGVVNAL | 929 | GCGGGGGTGGTGAATGCTTTG | 930 | 4015 | 1870 | 2145 |
| 175 | ANPVGNV | 931 | GCGAATCCTGTTGGGAATGTT | 932 | 4000 | 2483 | 1517 |
| 176 | VQGTQTG | 933 | GTGCAGGGTACGCAGACTGGT | 934 | 4000 | 2000 | 2000 |
| 177 | SPGFSIA | 935 | TCTCCTGGATTCAGCATCGCT | 936 | 4000 | 2000 | 2000 |
| 178 | AIERLTV | 937 | GCAATCGAAAGACTAACCGTT | 938 | 4000 | 2000 | 2000 |
| 179 | TDKQNAF | 939 | ACGGACAAACAAAACGCATTC | 940 | 4000 | 2000 | 2000 |
| 180 | LADSKDR | 941 | CTGGCAGACTCGAAAGACAGG | 942 | 4000 | 2000 | 2000 |
| 181 | VHSTGEW | 943 | GTACACAGCACAGGCGAATGG | 944 | 4000 | 2000 | 2000 |
| 182 | LHNALAV | 945 | CTGCATAATGCTCTGGCTGTT | 946 | 4000 | 4000 | 0 |
| 183 | IGLDPKA | 947 | ATTGGTTTGGATCCGAAGGCG | 948 | 3982 | 3549 | 433 |
| 184 | VMASTGP | 949 | GTTATGGCTTCGACTGGTCCT | 950 | 3980 | 3654 | 326 |
| 185 | SVPGTVS | 951 | AGTGTGCCGGGGACTGTGTCT | 952 | 3970 | 2804 | 1166 |
| 186 | MLSNGQV | 953 | ATGCTGTCTAATGGGCAGGTT | 954 | 3965 | 3965 | 0 |
| 187 | ASTATLR | 955 | GCGTCTACTGCTACTCTTCGG | 956 | 3963 | 2082 | 1880 |
| 188 | PGEHYQG | 957 | CCGGGTGAGCATTATCAGGGT | 958 | 3963 | 1963 | 2000 |
| 189 | QVTDNKT | 959 | CAGGTGACTGATAATAAGACT | 960 | 3957 | 2201 | 1756 |
| 190 | NGLQVSI | 961 | AACGGACTACAAGTGTCTATC | 962 | 3956 | 3956 | 0 |
| 191 | SHPGNEL | 963 | AGCCACCCCGGCAACGAACTC | 964 | 3952 | 3764 | 188 |
| 192 | VSLNGGH | 965 | GTGTCGCTTAATGGGGGGCAT | 966 | 3950 | 1950 | 2000 |
| 193 | MVASSID | 967 | ATGGTGGCTTCATCCATAGAC | 968 | 3938 | 2000 | 1938 |
| 194 | MGVNTTI | 969 | ATGGGGGTGAATACGACTATT | 970 | 3936 | 3388 | 548 |
| 195 | MNGGHLM | 971 | ATGAATGGGGGTCATCTTATG | 972 | 3934 | 3406 | 528 |
| 196 | LGSDGRT | 973 | CTTGGCTCAGACGGCCGAACC | 974 | 3931 | 1384 | 2547 |
| 197 | RVDTPQL | 975 | CGAGTCGACACACCACAATTG | 976 | 3926 | 1566 | 2360 |
| 198 | TEQAKLS | 977 | ACTGAACAAGCCAAACTATCT | 978 | 3925 | 1925 | 2000 |
| 199 | IGTNSTY | 979 | ATTGGTACGAATAGTACGTAT | 980 | 3903 | 3847 | 56 |
| 200 | LSESANR | 981 | TTGTCGGAGAGTGCGAATCGT | 982 | 3891 | 2810 | 1082 |
| 201 | GQSSNQH | 983 | GGGCAGTCGTCTAATCAGCAT | 984 | 3855 | 1478 | 2377 |
| 202 | MRSEQTT | 985 | ATGCGTAGTGAGCAGACGACG | 986 | 3854 | 2000 | 1854 |
| 203 | AGISTQT | 987 | GCGGGGATTAGTACTCAGACG | 988 | 3835 | 1783 | 2052 |
| 204 | TGESNVG | 989 | ACTGGGGAGAGTAATGTTGGT | 990 | 3820 | 2000 | 1820 |
| 205 | ALANVSN | 991 | GCGCTTGCCAACGTTTCCAAC | 992 | 3800 | 0 | 3800 |
| 206 | SFGMVVD | 993 | TCGTTCGGCATGGTAGTCGAC | 994 | 3800 | 0 | 3800 |
| 207 | TMSHAEL | 995 | ACCATGTCGCACGCAGAATTA | 996 | 3792 | 1792 | 2000 |
| 208 | LSNMVSA | 997 | TTGAGTAATATGGTGAGTGCT | 998 | 3778 | 450 | 3328 |
| 209 | HGTLVSR | 999 | CATGGGACTTTGGTGTCTCGG | 1000 | 3763 | 1763 | 2000 |
| 210 | VAVTGAI | 1001 | GTTGCGGTGACTGGTGCTATT | 1002 | 3756 | 1952 | 1803 |
| 211 | IMVDAHA | 1003 | ATTATGGTTGATGCTCATGCG | 1004 | 3753 | 3753 | 0 |
| 212 | TPTLPFI | 1005 | ACGCCTACGTTGCCTTTTATT | 1006 | 3751 | 0 | 3751 |
| 213 | GIAGLGI | 1007 | GGTATTGCTGGGCTTGGGATT | 1008 | 3750 | 1438 | 2312 |
| 214 | SSLPDKT | 1009 | TCATCCCTACCGGACAAAACC | 1010 | 3746 | 0 | 3746 |
| 215 | QSQTALR | 1011 | CAATCCCAAACAGCATTGCGA | 1012 | 3744 | 2362 | 1382 |
| 216 | AVGNELL | 1013 | GCCGTTGGCAACGAACTGCTG | 1014 | 3744 | 1744 | 2000 |
| 217 | GSGAGVA | 1015 | GGGAGCGGCGCCGGTGTAGCC | 1016 | 3744 | 3663 | 81 |
| 218 | ESGLINV | 1017 | GAGTCGGGTCTGATTAATGTG | 1018 | 3732 | 5 | 3727 |
| 219 | PNAGFDR | 1019 | CCGAACGCGGGGTTCGACCGT | 1020 | 3720 | 1720 | 2000 |
| 220 | LNQGLGD | 1021 | CTGAATCAGGGGTTGGGGGAT | 1022 | 3716 | 2002 | 1714 |
| 221 | ALASVGV | 1023 | GCGTTGGCATCCGTGGGTGTC | 1024 | 3715 | 1489 | 2226 |
| 222 | SEGPSRY | 1025 | TCGGAGGGTCCTTCGCGTTAT | 1026 | 3710 | 2201 | 1509 |
| 223 | SYGDGGV | 1027 | TCGTATGGTGATGGTGGTGTT | 1028 | 3708 | 2913 | 795 |
| 224 | LGHNSGV | 1029 | TTGGGGCATAATTCTGGTGTT | 1030 | 3696 | 1406 | 2290 |
| 225 | SSPNVGP | 1031 | TCTTCTCCGAACGTCGGTCCT | 1032 | 3688 | 2600 | 1088 |
| 226 | VSGTSTH | 1033 | GTTTCGGGTACTTCTACGCAT | 1034 | 3687 | 3471 | 216 |
| 227 | SEGGNNR | 1035 | AGTGAGGGTGGGAATAATCGG | 1036 | 3680 | 2379 | 1302 |
| 228 | SGASLSN | 1037 | TCCGGAGCATCCCTTTCCAAC | 1038 | 3672 | 0 | 3672 |
| 229 | SNGVPSS | 1039 | AGCAACGGAGTACCGTCATCG | 1040 | 3659 | 1618 | 2041 |
| 230 | ESGTHLS | 1041 | GAGTCTGGGACTCATTTGTCG | 1042 | 3655 | 2745 | 909 |
| 231 | VTVQVQR | 1043 | GTTACGGTGCAGGTGCAGAGG | 1044 | 3652 | 3652 | 0 |
| 232 | ASESTPR | 1045 | GCTAGTGAGTCTACGCCGCGT | 1046 | 3651 | 1665 | 1986 |
| 233 | LVTFRAD | 1047 | CTTGTTACTTTTCGTGCGGAT | 1048 | 3646 | 2633 | 1013 |
| 234 | LTQMSNK | 1049 | CTGACTCAGATGAGTAATAAG | 1050 | 3640 | 2963 | 677 |
| 235 | AVEGSRL | 1051 | GCGGTGGAGGGTTCGAGGCTG | 1052 | 3635 | 2008 | 1627 |
| 236 | PNERINV | 1053 | CCGAATGAGAGGATTAATGTG | 1054 | 3626 | 2003 | 1623 |
| 237 | GDHDRGS | 1055 | GGAGACCACGACAGGGGCTCG | 1056 | 3617 | 3617 | 0 |
| 238 | RHQVSES | 1057 | CGTCATCAGGTTAGTGAGAGT | 1058 | 3610 | 2863 | 747 |
| 239 | LDGLNLH | 1059 | CTAGACGGCTTGAACCTCCAC | 1060 | 3604 | 1330 | 2274 |
| 240 | PGNGTLV | 1061 | CCGGGGAATGGGACGTTGGTT | 1062 | 3598 | 2238 | 1360 |
| 241 | DSYGGNA | 1063 | GACTCGTACGGGGGGAACGCC | 1064 | 3596 | 3570 | 26 |
| 242 | LHKGSES | 1065 | CTTCATAAGGGTAGTGAGAGT | 1066 | 3593 | 2662 | 931 |
| 243 | SVDIVKL | 1067 | TCGGTTGATATTGTGAAGCTT | 1068 | 3590 | 626 | 2964 |
| 244 | HTLSTGV | 1069 | CATACGCTGAGTACTGGGGTG | 1070 | 3588 | 2000 | 1588 |
| 245 | SQINSGS | 1071 | TCCCAAATAAACTCTGGCAGC | 1072 | 3583 | 3046 | 537 |
| 246 | ALSGLDK | 1073 | GCCCTGAGTGGGCTAGACAAA | 1074 | 3582 | 3582 | 0 |
| 247 | RNSESEA | 1075 | CGAAACAGCGAATCGGAAGCG | 1076 | 3576 | 739 | 2837 |
| 248 | PNERHTL | 1077 | CCTAACGAACGCCACACCTTG | 1078 | 3575 | 2000 | 1575 |
| 249 | VNAGLGI | 1079 | GTAAACGCCGGCTTGGGCATC | 1080 | 3571 | 2987 | 584 |
| 250 | PASGALT | 1081 | CCGGCTTCGGGTGCTCTTACT | 1082 | 3567 | 1259 | 2308 |
| 251 | SAMVTSP | 1083 | TCAGCCATGGTTACCTCGCCA | 1084 | 3564 | 1057 | 2507 |
| 252 | DSHVSGK | 1085 | GACTCACACGTCAGTGGAAAA | 1086 | 3556 | 2082 | 1474 |
| 253 | SPQGALA | 1087 | TCGCCGCAGGGGGCTCTTGCT | 1088 | 3553 | 0 | 3553 |
| 254 | GDNPAVA | 1089 | GGTGATAATCCTGCGGTGGCT | 1090 | 3547 | 3363 | 184 |
| 255 | KEIHVSV | 1091 | AAAGAAATCCACGTTTCTGTG | 1092 | 3543 | 3345 | 197 |
| 256 | VTTVSTV | 1093 | GTGACTACGGTTTCTACTGTG | 1094 | 3542 | 1419 | 2124 |
| 257 | WTDGVSR | 1095 | TGGACTGATGGGGTGTCGCGG | 1096 | 3538 | 867 | 2671 |
| 258 | AADSSAR | 1097 | GCGGCGGATAGTTCTGCGCGG | 1098 | 3535 | 3428 | 107 |
| 259 | LDNRTMK | 1099 | CTTGATAATCGTACTATGAAG | 1100 | 3531 | 4 | 3527 |
| 260 | DVADSKR | 1101 | GATGTTGCTGATTCTAAGCGT | 1102 | 3530 | 2001 | 1529 |
| 261 | SVGGTIH | 1103 | TCGGTTGGTGGTACGATTCAT | 1104 | 3522 | 2000 | 1522 |
| 262 | PLTAGVS | 1105 | CCTCTGACGGCGGGGGTGTCG | 1106 | 3520 | 1181 | 2339 |
| 263 | AADISVR | 1107 | GCAGCAGACATATCAGTCCGC | 1108 | 3518 | 3518 | 0 |
| 264 | YADSHTD | 1109 | TACGCCGACAGCCACACAGAC | 1110 | 3516 | 3516 | 0 |
| 265 | VDVNLTR | 1111 | GTCGACGTAAACTTAACAAGA | 1112 | 3512 | 1664 | 1848 |
| 266 | AIAEYQV | 1113 | GCGATTGCGGAGTATCAGGTG | 1114 | 3497 | 2231 | 1266 |
| 267 | SRVDGSG | 1115 | TCGCGTGTTGATGGTTCGGGT | 1116 | 3492 | 1573 | 1919 |
| 268 | HGDGVRV | 1117 | CACGGGGACGGAGTACGCGTC | 1118 | 3482 | 3345 | 137 |
| 269 | HESRDHS | 1119 | CACGAATCGAGAGACCACAGT | 1120 | 3477 | 2000 | 1477 |
| 270 | RYEQNTP | 1121 | AGGTACGAACAAAACACTCCC | 1122 | 3475 | 3022 | 453 |
| 271 | ALASTQT | 1123 | GCGTTGGCGAGTACTCAGACG | 1124 | 3475 | 2221 | 1254 |
| 272 | FSSERLP | 1125 | TTTTCGTCTGAGCGGCTTCCG | 1126 | 3467 | 3467 | 0 |
| 273 | TTTHEGV | 1127 | ACGACGACTCATGAGGGGGTG | 1128 | 3463 | 2359 | 1104 |
| 274 | RMDSAQL | 1129 | AGGATGGATTCGGCGCAGCTT | 1130 | 3450 | 0 | 3450 |
| 275 | SHGPDSK | 1131 | TCTCATGGTCCTGATTCGAAG | 1132 | 3448 | 2653 | 795 |
| 276 | SVATGVL | 1133 | TCGGTTGCGACGGGGGTTCTG | 1134 | 3447 | 3059 | 388 |
| 277 | LLASGAK | 1135 | CTGCTTGCGAGTGGGGCTAAG | 1136 | 3447 | 1315 | 2132 |
| 278 | ASLGAYS | 1137 | GCGTCGCTTGGGGCGTATTCG | 1138 | 3445 | 2442 | 1003 |
| 279 | KELLVSA | 1139 | AAAGAACTCTTAGTAAGTGCA | 1140 | 3440 | 425 | 3015 |
| 280 | SLGVAVA | 1141 | AGTTTAGGTGTCGCCGTCGCC | 1142 | 3440 | 2000 | 1440 |
| 281 | VSGSISK | 1143 | GTTTCGGGGAGTATTTCTAAG | 1144 | 3429 | 3108 | 322 |
| 282 | TTSGQTM | 1145 | ACCACTTCCGGTCAAACAATG | 1146 | 3427 | 3123 | 304 |
| 283 | QTVGPLN | 1147 | CAAACAGTAGGACCGTTAAAC | 1148 | 3410 | 1308 | 2102 |
| 284 | VNGNNTY | 1149 | GTAAACGGCAACAACACCTAC | 1150 | 3409 | 3122 | 287 |
| 285 | VAEGGGV | 1151 | GTAGCCGAAGGCGGTGGCGTC | 1152 | 3408 | 3139 | 269 |
| 286 | GSGENVR | 1153 | GGCTCTGGCGAAAACGTAAGG | 1154 | 3408 | 2977 | 431 |
| 287 | AADSSMR | 1155 | GCGGCGGATAGTTCTATGCGG | 1156 | 3406 | 3189 | 217 |
| 288 | LDGLNLH | 1157 | CTGGATGGGCTGAATCTTCAT | 1158 | 3402 | 582 | 2820 |
| 289 | MAGALGP | 1159 | ATGGCAGGTGCACTGGGTCCC | 1160 | 3400 | 2501 | 898 |
| 290 | GLNEHGA | 1161 | GGTCTGAATGAGCATGGGGCG | 1162 | 3390 | 2628 | 762 |
| 291 | LLSSENR | 1163 | CTCTTGTCTTCTGAAAACCGG | 1164 | 3389 | 2323 | 1066 |
| 292 | RDVSGHI | 1165 | AGGGATGTGTCGGGGCATATT | 1166 | 3383 | 3383 | 0 |
| 293 | GDQAMVN | 1167 | GGGGATCAGGCTATGGTTAAT | 1168 | 3380 | 0 | 3380 |
| 294 | AHVDVKV | 1169 | GCCCACGTAGACGTAAAAGTT | 1170 | 3379 | 537 | 2842 |
| 295 | ALANSER | 1171 | GCTTTGGCGAATTCTGAGCGG | 1172 | 3378 | 1661 | 1717 |
| 296 | KGSDTTI | 1173 | AAGGGTTCTGATACTACTATT | 1174 | 3378 | 2686 | 692 |
| 297 | VAQGSVV | 1175 | GTGGCTCAGGGGTCGGTTGTT | 1176 | 3371 | 2834 | 537 |
| 298 | GFEDGAR | 1177 | GGCTTCGAAGACGGTGCTCGA | 1178 | 3360 | 1746 | 1614 |
| 299 | QADNHVR | 1179 | CAGGCGGATAATCATGTTAGG | 1180 | 3357 | 2683 | 674 |
| 300 | RHADSTV | 1181 | CGTCATGCTGATTCTACGGTT | 1182 | 3355 | 3217 | 138 |
| 301 | PMSQGEL | 1183 | CCGATGAGTCAGGGGGAGTTG | 1184 | 3354 | 1354 | 2000 |
| 302 | GNSGGHV | 1185 | GGGAATAGTGGGGGTCATGTT | 1186 | 3350 | 2574 | 776 |
| 303 | RNQAEEM | 1187 | AGAAACCAAGCTGAAGAAATG | 1188 | 3348 | 123 | 3225 |
| 304 | LLSSENR | 1189 | CTTCTGTCGTCGGAGAATAGG | 1190 | 3346 | 514 | 2831 |
| 305 | GFEGGTR | 1191 | GGGTTCGAAGGCGGCACTCGA | 1192 | 3343 | 2297 | 1046 |
| 306 | GGGSESY | 1193 | GGAGGGGGGTCAGAATCATAC | 1194 | 3337 | 2984 | 353 |
| 307 | EAASAIS | 1195 | GAAGCGGCATCAGCCATATCC | 1196 | 3329 | 1054 | 2274 |
| 308 | LTTPIEL | 1197 | TTGACGACTCCGATTGAGTTG | 1198 | 3328 | 1036 | 2292 |
| 309 | RTMSVML | 1199 | CGCACCATGTCTGTCATGCTG | 1200 | 3326 | 1491 | 1835 |
| 310 | GIHETRA | 1201 | GGCATCCACGAAACACGGGCA | 1202 | 3320 | 2000 | 1320 |
| 311 | SEGHSSY | 1203 | TCGGAGGGTCATTCGAGTTAT | 1204 | 3317 | 2459 | 858 |
| 312 | SVSDVKH | 1205 | AGTGTCTCGGACGTCAAACAC | 1206 | 3308 | 3093 | 215 |
| 313 | LSVSQSA | 1207 | CTCTCCGTCAGTCAATCTGCT | 1208 | 3295 | 1511 | 1784 |
| 314 | VVKEYES | 1209 | GTAGTCAAAGAATACGAAAGC | 1210 | 3291 | 859 | 2432 |
| 315 | RVGAEGT | 1211 | CGGGTTGGGGCGGAGGGGACG | 1212 | 3281 | 3281 | 0 |
| 316 | QAGLGVI | 1213 | CAGGCTGGTCTTGGTGTTATT | 1214 | 3278 | 0 | 3278 |
| 317 | RVHSTDT | 1215 | CGAGTCCACTCGACCGACACG | 1216 | 3274 | 1079 | 2195 |
| 318 | VATESAF | 1217 | GTGGCAACCGAATCAGCATTC | 1218 | 3270 | 3270 | 0 |
| 319 | SNGAGYL | 1219 | TCGAATGGGGGGGGTTATCTT | 1220 | 3269 | 306 | 2963 |
| 320 | VGEGNKF | 1221 | GTGGGTGAGGGGAATAAGTTT | 1222 | 3268 | 816 | 2451 |
| 321 | DVRGSVI | 1223 | GATGTGAGGGGTTCGGTTATT | 1224 | 3263 | 1137 | 2126 |
| 322 | PLDGQGK | 1225 | CCGCTAGACGGCCAAGGCAAA | 1226 | 3255 | 3255 | 0 |
| 323 | ASVSSQL | 1227 | GCCAGCGTCAGCTCACAACTC | 1228 | 3254 | 1140 | 2114 |
| 324 | LAKEESH | 1229 | CTTGCTAAGGAGGAGTCGCAT | 1230 | 3252 | 704 | 2548 |
| 325 | FTHGTGT | 1231 | TTCACGCACGGCACTGGGACG | 1232 | 3241 | 2000 | 1241 |
| 326 | ASVSSQS | 1233 | GCCTCGGTCTCGAGTCAATCA | 1234 | 3232 | 3232 | 0 |
| 327 | GVADNVK | 1235 | GGTGTCGCAGACAACGTCAAA | 1236 | 3226 | 2673 | 553 |
| 328 | SAGVPGV | 1237 | TCGGCTGGAGTACCTGGAGTC | 1238 | 3223 | 1005 | 2218 |
| 329 | SDSTVVG | 1239 | TCTGATAGTACTGTTGTGGGG | 1240 | 3214 | 1119 | 2095 |
| 330 | FAGIAQA | 1241 | TTTGCGGGGATTGCGCAGGCG | 1242 | 3209 | 0 | 3209 |
| 331 | QSDLGRV | 1243 | CAGTCGGATCTTGGGAGGGTG | 1244 | 3209 | 3125 | 85 |
| 332 | PLQNNPH | 1245 | CCGCTTCAGAATAATCCGCAT | 1246 | 3204 | 1946 | 1258 |
| 333 | PGTNSFS | 1247 | CCCGGAACCAACAGTTTCTCT | 1248 | 3201 | 647 | 2554 |
| 334 | QEQGTST | 1249 | CAAGAACAAGGCACTTCGACG | 1250 | 3197 | 2891 | 306 |
| 335 | RSEVNGV | 1251 | CGTTCAGAAGTAAACGGTGTC | 1252 | 3196 | 3006 | 190 |
| 336 | LTDKMTS | 1253 | TTGACTGATAAGATGACGTCG | 1254 | 3194 | 1064 | 2130 |
| 337 | GGTISGP | 1255 | GGGGGTACGATTAGTGGTCCT | 1256 | 3190 | 3190 | 0 |
| 338 | ADGKGAI | 1257 | GCGGATGGGAAGGGTGCGATT | 1258 | 3188 | 3080 | 108 |
| 339 | RTGDTIS | 1259 | CGGACGGGCGACACAATCAGT | 1260 | 3185 | 3095 | 90 |
| 340 | PMSPGVA | 1261 | CCGATGTCTCCGGGGGTGGCT | 1262 | 3178 | 3178 | 0 |
| 341 | SVMTDRP | 1263 | TCGGTGATGACCGACAGACCT | 1264 | 3172 | 869 | 2303 |
| 342 | PTEGTLR | 1265 | CCTACTGAGGGGACGCTTCGG | 1266 | 3171 | 894 | 2278 |
| 343 | ASGTGMT | 1267 | GCCTCAGGGACCGGCATGACG | 1268 | 3171 | 1171 | 2000 |
| 344 | SANPVAR | 1269 | AGCGCTAACCCCGTAGCTCGG | 1270 | 3170 | 1988 | 1182 |
| 345 | AAGVNLN | 1271 | GCGGCGGGTGTTAATCTGAAT | 1272 | 3170 | 1915 | 1255 |
| 346 | TNQVITH | 1273 | ACAAACCAAGTAATAACTCAC | 1274 | 3169 | 2316 | 853 |
| 347 | PLINGLV | 1275 | CCTTTGATTAATGGGCTGGTG | 1276 | 3168 | 2731 | 437 |
| 348 | KSHSENN | 1277 | AAGTCGCATTCGGAGAATAAT | 1278 | 3168 | 3055 | 114 |
| 349 | MNGGHVK | 1279 | ATGAATGGGGGTCATGTTAAG | 1280 | 3165 | 1765 | 1400 |
| 350 | LAGTLVQ | 1281 | TTGGCAGGAACCCTAGTACAA | 1282 | 3163 | 2352 | 811 |
| 351 | PLKGGGE | 1283 | CCTCTGAAGGGTGGTGGGGAG | 1284 | 3161 | 3159 | 2 |
| 352 | VVNSSSS | 1285 | GTAGTGAACTCCTCTTCTTCC | 1286 | 3161 | 3161 | 0 |
| 353 | SKADAYS | 1287 | TCGAAGGCTGATGCTTATAGT | 1288 | 3160 | 3160 | 0 |
| 354 | MIGDVSP | 1289 | ATGATCGGAGACGTAAGTCCT | 1290 | 3159 | 3159 | 0 |
| 355 | LDSSRFH | 1291 | CTGGATAGTTCGCGTTTTCAT | 1292 | 3156 | 2645 | 512 |
| 356 | GLMSNAK | 1293 | GGACTCATGAGTAACGCAAAA | 1294 | 3156 | 1176 | 1981 |
| 357 | PSVGMAT | 1295 | CCTTCAGTTGGCATGGCGACT | 1296 | 3154 | 2400 | 755 |
| 358 | SSEGRNV | 1297 | AGTAGTGAGGGTCGTAATGTG | 1298 | 3152 | 2545 | 608 |
| 359 | LQEQLAG | 1299 | CTTCAGGAGCAGCTTGCTGGG | 1300 | 3152 | 930 | 2222 |
| 360 | VGVPLGR | 1301 | GTGGGTGTGCCGCTTGGTCGG | 1302 | 3149 | 0 | 3149 |
| 361 | AGASAEA | 1303 | GCTGGGGCTAGTGCTGAGGCG | 1304 | 3145 | 0 | 3145 |
| 362 | VNSSENK | 1305 | GTGAACAGCTCCGAAAACAAA | 1306 | 3145 | 1540 | 1605 |
| 363 | INGRNDI | 1307 | ATAAACGGCCGGAACGACATC | 1308 | 3143 | 2564 | 579 |
| 364 | VMASTGP | 1309 | GTAATGGCGTCAACAGGACCG | 1310 | 3140 | 1140 | 2000 |
| 365 | AASEVYV | 1311 | GCTGCTTCTGAGGTTTATGTT | 1312 | 3137 | 2581 | 556 |
| 366 | RNNVDST | 1313 | CGCAACAACGTAGACAGTACT | 1314 | 3136 | 2822 | 314 |
| 367 | LDASKLV | 1315 | CTCGACGCATCCAAATTGGTT | 1316 | 3130 | 996 | 2134 |
| 368 | AGDSSVR | 1317 | GCTGGTGACTCAAGTGTACGT | 1318 | 3125 | 2525 | 600 |
| 369 | SGSNTGP | 1319 | TCGGGGTCTAATACGGGTCCT | 1320 | 3124 | 2969 | 155 |
| 370 | GTLERTA | 1321 | GGTACTCTTGAGAGGACTGCT | 1322 | 3122 | 2898 | 224 |
| 371 | KLTSEMT | 1323 | AAATTAACATCCGAAATGACC | 1324 | 3121 | 2467 | 654 |
| 372 | DATTKSM | 1325 | GACGCCACAACTAAATCCATG | 1326 | 3120 | 3120 | 0 |
| 373 | GLAGRVV | 1327 | GGGTTGGCGGGGCGTGTTGTT | 1328 | 3117 | 0 | 3117 |
| 374 | AAGGIMN | 1329 | GCTGCCGGGGGGATCATGAAC | 1330 | 3116 | 0 | 3116 |
| 375 | ISDYTTL | 1331 | ATATCAGACTACACAACACTT | 1332 | 3116 | 0 | 3116 |
| 376 | VQHDLTL | 1333 | GTCCAACACGACCTTACCCTT | 1334 | 3116 | 2577 | 540 |
| 377 | MAGSVSK | 1335 | ATGGCTGGTTCGGTATCAAAA | 1336 | 3113 | 1928 | 1184 |
| 378 | SYGSDSK | 1337 | TCTTATGGTTCTGATTCGAAG | 1338 | 3109 | 830 | 2279 |
| 379 | VLSSPGP | 1339 | GTTCTGTCTTCGCCTGGTCCT | 1340 | 3108 | 981 | 2127 |
| 380 | VNSGQQN | 1341 | GTAAACAGCGGCCAACAAAAC | 1342 | 3106 | 2366 | 739 |
| 381 | TSQGAIT | 1343 | ACGTCGCAAGGCGCAATAACC | 1344 | 3106 | 1567 | 1539 |
| 382 | AIGHSQV | 1345 | GCGATTGGTCATAGTCAGGTT | 1346 | 3106 | 3106 | 0 |
| 383 | QADIVGL | 1347 | CAGGCTGATATTGTTGGGCTG | 1348 | 3105 | 1105 | 2000 |
| 384 | SKSNDSS | 1349 | AGTAAGTCTAATGATAGTTCT | 1350 | 3104 | 573 | 2532 |
| 385 | LLAGADR | 1351 | TTGCTTGCTGGTGCTGATCGT | 1352 | 3100 | 2577 | 522 |
| 386 | VYSDRTM | 1353 | GTCTACAGTGACCGCACCATG | 1354 | 3099 | 2930 | 169 |
| 387 | SEGGVKY | 1355 | AGTGAGGGGGGTGTGAAGTAT | 1356 | 3099 | 2806 | 293 |
| 388 | SSDGGKG | 1357 | TCAAGCGACGGCGGCAAAGGA | 1358 | 3096 | 2000 | 1096 |
| 389 | LTHSTAD | 1359 | TTGACCCACTCCACAGCCGAC | 1360 | 3095 | 2372 | 724 |
| 390 | PGGESRG | 1361 | CCTGGTGGGGAGTCTCGGGGG | 1362 | 3094 | 2629 | 465 |
| 391 | PMNGSTR | 1363 | CCGATGAACGGGTCCACTAGG | 1364 | 3089 | 2000 | 1089 |
| 392 | STDGGST | 1365 | TCGACTGATGGTGGTAGTACT | 1366 | 3088 | 2000 | 1088 |
| 393 | EASGMNH | 1367 | GAAGCAAGCGGTATGAACCAC | 1368 | 3086 | 2000 | 1086 |
| 394 | SGDKAAL | 1369 | AGTGGTGATAAGGCTGCGTTG | 1370 | 3086 | 3086 | 0 |
| 395 | MLRGYSQ | 1371 | ATGTTACGCGGGTACTCGCAA | 1372 | 3084 | 233 | 2852 |
| 396 | GGGVEVH | 1373 | GGGGGTGGTGTGGAGGTTCAT | 1374 | 3082 | 914 | 2168 |
| 397 | NVIVNGV | 1375 | AATGTGATTGTGAATGGGGTG | 1376 | 3079 | 1034 | 2044 |
| 398 | WNLDKTH | 1377 | TGGAATCTTGATAAGACTCAT | 1378 | 3075 | 821 | 2254 |
| 399 | AQGGATV | 1379 | GCCCAAGGTGGCGCGACGGTA | 1380 | 3073 | 0 | 3073 |
| 400 | PLINGLV | 1381 | CCACTTATCAACGGCTTAGTT | 1382 | 3073 | 668 | 2405 |
| 401 | RVELTGT | 1383 | CGCGTAGAATTGACCGGCACG | 1384 | 3072 | 2886 | 186 |
| 402 | GEGGTVR | 1385 | GGTGAGGGTGGTACTGTGAGG | 1386 | 3068 | 1614 | 1454 |
| 403 | GAGELSS | 1387 | GGTGCGGGGGAGCTTAGTAGT | 1388 | 3064 | 2000 | 1064 |
| 404 | LGKAVPD | 1389 | CTTGGTAAGGCGGTTCCGGAT | 1390 | 3063 | 2000 | 1063 |
| 405 | WADTKDR | 1391 | TGGGCCGACACGAAAGACCGA | 1392 | 3063 | 2961 | 102 |
| 406 | LAGLGGM | 1393 | CTAGCTGGCCTCGGTGGAATG | 1394 | 3061 | 2769 | 292 |
| 407 | PVLAAGH | 1395 | CCAGTACTAGCGGCTGGGCAC | 1396 | 3056 | 980 | 2076 |
| 408 | SDTIGLR | 1397 | AGTGACACCATAGGCCTCCGC | 1398 | 3056 | 2758 | 298 |
| 409 | GVKETRA | 1399 | GGCGTCAAAGAAACCCGGGCC | 1400 | 3055 | 953 | 2102 |
| 410 | AETMGVA | 1401 | GCAGAAACCATGGGTGTCGCC | 1402 | 3052 | 895 | 2157 |
| 411 | SLTDRAS | 1403 | TCGTTGACGGATAGGGCGTCT | 1404 | 3051 | 1051 | 2000 |
| 412 | RSNGSEN | 1405 | AGGTCGAATGGTTCGGAGAAT | 1406 | 3051 | 2853 | 198 |
| 413 | PGSDGRT | 1407 | CCGGGTTCTGATGGTCGTACT | 1408 | 3051 | 2852 | 199 |
| 414 | TRTEDYT | 1409 | ACTCGCACTGAAGACTACACC | 1410 | 3051 | 3051 | 0 |
| 415 | PSVSVTL | 1411 | CCTTCTGTTTCTGTGACTTTG | 1412 | 3049 | 1047 | 2002 |
| 416 | LSTGAEK | 1413 | CTCTCTACCGGCGCAGAAAAA | 1414 | 3046 | 2000 | 1046 |
| 417 | SETNGVR | 1415 | AGCGAAACGAACGGCGTCCGG | 1416 | 3044 | 408 | 2635 |
| 418 | SPQVYDD | 1417 | AGTCCGCAGGTTTATGATGAT | 1418 | 3042 | 1042 | 2000 |
| 419 | EGGTHVR | 1419 | GAAGGTGGCACCCACGTACGG | 1420 | 3036 | 2865 | 171 |
| 420 | STLGSTR | 1421 | TCGACGTTGGGTAGTACGAGG | 1422 | 3036 | 2829 | 206 |
| 421 | SEGKVGP | 1423 | TCTGAGGGTAAGGTTGGGCCT | 1424 | 3035 | 1318 | 1717 |
| 422 | AVKDELV | 1425 | GCTGTTAAGGATGAGCTGGTG | 1426 | 3032 | 0 | 3032 |
| 423 | TPSGNLM | 1427 | ACGCCGTCGGGGAATCTTATG | 1428 | 3029 | 2000 | 1029 |
| 424 | VMTGTLT | 1429 | GTGATGACGGGGACTTTGACT | 1430 | 3028 | 0 | 3028 |
| 425 | QIASADI | 1431 | CAGATTGCGAGTGCGGATATT | 1432 | 3027 | 0 | 3027 |
| 426 | LYGDGSV | 1433 | CTTTATGGTGATGGTAGTGTT | 1434 | 3024 | 2000 | 1024 |
| 427 | PTQLQRV | 1435 | CCGACTCAGCTGCAGCGTGTG | 1436 | 3023 | 0 | 3023 |
| 428 | SNVQDGL | 1437 | AGCAACGTCCAAGACGGACTA | 1438 | 3014 | 0 | 3014 |
| 429 | YDAKVGH | 1439 | TACGACGCAAAAGTGGGGCAC | 1440 | 3014 | 2942 | 71 |
| 430 | AVGLDNR | 1441 | GCTGTGGGTCTGGATAATCGT | 1442 | 3012 | 908 | 2104 |
| 431 | NSNDVHM | 1443 | AACTCTAACGACGTCCACATG | 1444 | 3011 | 0 | 3011 |
| 432 | PSGALMT | 1445 | CCGAGTGGTGCGCTGATGACT | 1446 | 3010 | 1010 | 2000 |
| 433 | SQEQVSA | 1447 | AGTCAGGAGCAGGTGAGTGCT | 1448 | 3009 | 1967 | 1042 |
| 434 | GSGSDGV | 1449 | GGGAGTGGTAGTGATGGGGTT | 1450 | 3008 | 1008 | 2000 |
| 435 | VDTSDRV | 1451 | GTTGATACTAGTGATCGTGTT | 1452 | 3007 | 3006 | 1 |
| 436 | ATMSPTT | 1453 | GCCACAATGTCCCCTACAACG | 1454 | 3006 | 3006 | 0 |
| 437 | TPTLPFI | 1455 | ACACCCACCCTGCCATTCATA | 1456 | 2999 | 0 | 2999 |
| 438 | AVKEYDS | 1457 | GCGGTGAAGGAGTATGATTCG | 1458 | 2999 | 2779 | 220 |
| 439 | LSLPDGD | 1459 | CTCTCCTTACCAGACGGAGAC | 1460 | 2998 | 918 | 2080 |
| 440 | AEKSGMV | 1461 | GCCGAAAAATCTGGTATGGTC | 1462 | 2997 | 2748 | 249 |
| 441 | LNVDTGS | 1463 | CTCAACGTGGACACTGGTTCA | 1464 | 2989 | 2634 | 355 |
| 442 | PTQGTPR | 1465 | CCAACGCAAGGAACACCGCGA | 1466 | 2988 | 2988 | 0 |
| 443 | PVGTNAR | 1467 | CCTGTCGGCACAAACGCAAGA | 1468 | 2987 | 899 | 2088 |
| 444 | NGGIITR | 1469 | AACGGAGGTATCATCACCCGC | 1470 | 2983 | 1208 | 1775 |
| 445 | VVGTQDR | 1471 | GTTGTGGGGACTCAGGATAGG | 1472 | 2980 | 0 | 2980 |
| 446 | NTLHTST | 1473 | AATACTCTTCATACTTCGACT | 1474 | 2980 | 2637 | 342 |
| 447 | VGSLGTD | 1475 | GTAGGCTCGCTGGGTACTGAC | 1476 | 2973 | 1388 | 1585 |
| 448 | LSTVTGQ | 1477 | CTTTCGACGGTGACTGGGCAG | 1478 | 2970 | 980 | 1989 |
| 449 | VLTNTTT | 1479 | GTGCTTACGAATACTACTACT | 1480 | 2964 | 2680 | 283 |
| 450 | SGDKAAL | 1481 | TCCGGCGACAAAGCCGCACTT | 1482 | 2959 | 2518 | 441 |
| 451 | YQTETNN | 1483 | TATCAGACTGAGACGAATAAT | 1484 | 2957 | 2263 | 694 |
| 452 | SVGLVAG | 1485 | AGTGTGGGTTTGGTGGCTGGT | 1486 | 2951 | 784 | 2167 |
| 453 | RMTGDLT | 1487 | CGTATGACTGGAGACCTAACC | 1488 | 2951 | 2000 | 951 |
| 454 | TSGNLTW | 1489 | ACTTCTGGTAATTTGACGTGG | 1490 | 2950 | 0 | 2950 |
| 455 | ANVNVKV | 1491 | GCGAATGTTAATGTGAAGGTG | 1492 | 2948 | 1494 | 1454 |
| 456 | VNVTMTT | 1493 | GTTAATGTGACGATGACTACG | 1494 | 2947 | 1764 | 1182 |
| 457 | PGVSVTS | 1495 | CCTGGTGTGAGTGTGACTTCT | 1496 | 2946 | 0 | 2946 |
| 458 | TGDRDQF | 1497 | ACCGGCGACAGAGACCAATTC | 1498 | 2942 | 2383 | 560 |
| 459 | SKAEGPV | 1499 | AGTAAAGCCGAAGGACCTGTC | 1500 | 2942 | 2787 | 154 |
| 460 | DSAPAAR | 1501 | GATTCGGCTCCGGCGGCTCGG | 1502 | 2941 | 2498 | 443 |
| 461 | SRDDGRM | 1503 | TCGCGTGATGATGGGAGGATG | 1504 | 2939 | 2687 | 252 |
| 462 | IPEGSVR | 1505 | ATCCCTGAAGGATCAGTACGA | 1506 | 2938 | 938 | 2000 |
| 463 | VTTVSLV | 1507 | GTAACGACTGTGTCCCTAGTT | 1508 | 2933 | 2817 | 116 |
| 464 | PIHGASS | 1509 | CCGATTCATGGTGCTAGTTCG | 1510 | 2932 | 2343 | 589 |
| 465 | VSASISK | 1511 | GTTTCGGCGAGTATTTCTAAG | 1512 | 2931 | 919 | 2012 |
| 466 | TKDNGVM | 1513 | ACTAAGGATAATGGTGTGATG | 1514 | 2930 | 0 | 2930 |
| 467 | LGASVPK | 1515 | CTAGGCGCCTCCGTCCCCAAA | 1516 | 2929 | 775 | 2154 |
| 468 | IEGLGGL | 1517 | ATAGAAGGCCTCGGAGGTTTG | 1518 | 2929 | 2705 | 224 |
| 469 | VSGGDYS | 1519 | GTGAGTGGGGGTGATTATTCG | 1520 | 2927 | 1 | 2926 |
| 470 | SEKQKVR | 1521 | AGTGAGAAGCAGAAGGTTAGG | 1522 | 2927 | 0 | 2927 |
| 471 | PGRVSSE | 1523 | CCTGGTCGGGTCAGCTCAGAA | 1524 | 2927 | 927 | 2000 |
| 472 | DRITLGT | 1525 | GATCGGATTACGTTGGGGACG | 1526 | 2923 | 0 | 2923 |
| 473 | ANNGTTW | 1527 | GCTAATAATGGGACGACTTGG | 1528 | 2923 | 2636 | 288 |
| 474 | TSVISQV | 1529 | ACGAGTGTTATTTCGCAGGTT | 1530 | 2922 | 2922 | 0 |
| 475 | LANMMSV | 1531 | CTGGCTAATATGATGAGTGTT | 1532 | 2919 | 2919 | 0 |
| 476 | EIVLTVP | 1533 | GAAATAGTGCTGACCGTCCCC | 1534 | 2917 | 0 | 2917 |
| 477 | VHKDQEI | 1535 | GTGCATAAGGATCAGGAGATT | 1536 | 2917 | 2385 | 532 |
| 478 | QVGDSTL | 1537 | CAAGTAGGAGACTCGACGTTA | 1538 | 2917 | 2917 | 0 |
| 479 | SEKSVPL | 1539 | AGTGAGAAGAGTGTGCCGCTT | 1540 | 2903 | 2000 | 903 |
| 480 | SNHDLTH | 1541 | TCCAACCACGACCTTACCCAC | 1542 | 2902 | 2902 | 0 |
| 481 | NQLAEMV | 1543 | AACCAACTGGCTGAAATGGTG | 1544 | 2899 | 661 | 2238 |
| 482 | QMTHGLI | 1545 | CAGATGACTCATGGGCTTATT | 1546 | 2897 | 0 | 2897 |
| 483 | QVSDNKT | 1547 | CAAGTATCCGACAACAAAACC | 1548 | 2897 | 262 | 2635 |
| 484 | GGTNSAH | 1549 | GGGGGTACGAATAGTGCTCAT | 1550 | 2897 | 311 | 2587 |
| 485 | GAADRMQ | 1551 | GGGGCGGCGGATCGGATGCAG | 1552 | 2897 | 711 | 2187 |
| 486 | ESGVHQK | 1553 | GAGTCTGGTGTTCATCAGAAG | 1554 | 2896 | 511 | 2385 |
| 487 | GGTGALR | 1555 | GGCGGCACAGGGGCTCTCAGA | 1556 | 2896 | 1776 | 1119 |
| 488 | NTLGVAY | 1557 | AACACATTAGGCGTGGCATAC | 1558 | 2895 | 2000 | 895 |
| 489 | VQHSQDN | 1559 | GTGCAGCATTCGCAGGATAAT | 1560 | 2894 | 2775 | 119 |
| 490 | EYNTRDK | 1561 | GAGTATAATACTCGGGATAAG | 1562 | 2894 | 894 | 2000 |
| 491 | RSEVNGV | 1563 | CGGAGTGAGGTGAATGGGGTT | 1564 | 2889 | 1768 | 1122 |
| 492 | GLAETRA | 1565 | GGGCTTGCTGAGACTAGGGCT | 1566 | 2885 | 2135 | 750 |
| 493 | MNGGYVL | 1567 | ATGAACGGCGGATACGTACTT | 1568 | 2882 | 811 | 2071 |
| 494 | TSGNAGL | 1569 | ACTTCTGGTAATGCTGGGCTT | 1570 | 2881 | 2315 | 566 |
| 495 | NTTQTSW | 1571 | AACACTACACAAACGTCCTGG | 1572 | 2880 | 725 | 2156 |
| 496 | SLAGGTP | 1573 | TCGTTGGCTGGTGGTACTCCT | 1574 | 2879 | 595 | 2284 |
| 497 | MTGHDAV | 1575 | ATGACTGGGCATGATGCTGTG | 1576 | 2879 | 2746 | 133 |
| 498 | DETRTHI | 1577 | GACGAAACCCGGACACACATA | 1578 | 2878 | 2878 | 0 |
| 499 | DMLNNTA | 1579 | GACATGTTAAACAACACTGCT | 1580 | 2872 | 0 | 2872 |
| 500 | THNENMF | 1581 | ACTCACAACGAAAACATGTTC | 1582 | 2872 | 0 | 2872 |
| 501 | RNLDLTH | 1583 | CGTAACTTGGACTTAACGCAC | 1584 | 2871 | 0 | 2871 |
| 502 | RDNVEST | 1585 | AGGGACAACGTGGAATCAACA | 1586 | 2868 | 1357 | 1511 |
| 503 | NVVSLAT | 1587 | AATGTTGTGAGTCTGGCTACT | 1588 | 2864 | 1707 | 1157 |
| 504 | REMGQNA | 1589 | CGTGAGATGGGGCAGAATGCT | 1590 | 2858 | 2349 | 509 |
| 505 | AVVSAGP | 1591 | GCGGTGGTGTCTGCTGGGCCG | 1592 | 2855 | 0 | 2855 |
| 506 | LTGISLV | 1593 | CTTACAGGAATATCTCTCGTT | 1594 | 2853 | 1470 | 1383 |
| 507 | VLTVGSV | 1595 | GTACTCACGGTCGGGAGCGTG | 1596 | 2853 | 2682 | 171 |
| 508 | HRDSAEP | 1597 | CACAGGGACTCGGCGGAACCC | 1598 | 2851 | 2000 | 851 |
| 509 | VAALGMS | 1599 | GTTGCTGCTTTGGGTATGTCT | 1600 | 2850 | 0 | 2850 |
| 510 | TTSENLM | 1601 | ACGACGTCGGAGAATCTTATG | 1602 | 2848 | 2848 | 0 |
| 511 | YTAGSQA | 1603 | TACACTGCTGGCAGTCAAGCC | 1604 | 2845 | 1405 | 1440 |
| 512 | LSTLLGA | 1605 | TTGAGTACGCTACTCGGAGCC | 1606 | 2843 | 0 | 2843 |
| 513 | MSISEPR | 1607 | ATGAGTATCTCTGAACCCCGT | 1608 | 2840 | 1110 | 1730 |
| 514 | VMDHKST | 1609 | GTCATGGACCACAAATCTACA | 1610 | 2840 | 2840 | 0 |
| 515 | IKSDERL | 1611 | ATAAAAAGCGACGAACGTTTA | 1612 | 2840 | 2840 | 0 |
| 516 | TTEKHTG | 1613 | ACCACGGAAAAACACACGGGC | 1614 | 2839 | 0 | 2839 |
| 517 | ASPQGVR | 1615 | GCTAGTCCGCAGGGGGTTCGT | 1616 | 2838 | 2000 | 839 |
| 518 | PGQHNQA | 1617 | CCGGGTCAGCATAATCAGGCT | 1618 | 2837 | 881 | 1956 |
| 519 | PNLGNPS | 1619 | CCGAATCTGGGTAATCCTAGT | 1620 | 2836 | 2000 | 836 |
| 520 | RLTEADR | 1621 | CGGTTGACTGAGGCGGATCGT | 1622 | 2835 | 2699 | 136 |
| 521 | WNHSSTV | 1623 | TGGAACCACTCATCAACCGTG | 1624 | 2832 | 601 | 2230 |
| 522 | IGNALLK | 1625 | ATTGGTAATGCGTTGCTGAAG | 1626 | 2831 | 2410 | 420 |
| 523 | TAADHLR | 1627 | ACTGCTGCTGATCATTTGAGG | 1628 | 2830 | 718 | 2112 |
| 524 | MVSNDTS | 1629 | ATGGTTAGCAACGACACTAGC | 1630 | 2828 | 0 | 2828 |
| 525 | IQDSVQF | 1631 | ATTCAGGATTCGGTTCAGTTT | 1632 | 2827 | 370 | 2456 |
| 526 | MGENLPS | 1633 | ATGGGGGAGAATCTTCCGAGT | 1634 | 2826 | 293 | 2533 |
| 527 | ADSTQGK | 1635 | GCTGATTCGACTCAGGGTAAG | 1636 | 2826 | 1718 | 1108 |
| 528 | IPVDMNR | 1637 | ATCCCCGTCGACATGAACAGG | 1638 | 2825 | 467 | 2358 |
| 529 | SVDSGRL | 1639 | AGTGTTGATAGTGGGCGGCTT | 1640 | 2825 | 665 | 2160 |
| 530 | SYGDGGV | 1641 | TCTTACGGGGACGGAGGGGTC | 1642 | 2825 | 2521 | 304 |
| 531 | SHSLIEV | 1643 | TCTCATAGTCTGATTGAGGTG | 1644 | 2823 | 744 | 2079 |
| 532 | LAGLGVI | 1645 | CTGGCGGGGCTGGGCGTCATA | 1646 | 2823 | 623 | 2200 |
| 533 | MSVGQSW | 1647 | ATGTCAGTGGGTCAATCTTGG | 1648 | 2822 | 676 | 2146 |
| 534 | TRDGQLA | 1649 | ACCAGGGACGGACAACTCGCA | 1650 | 2820 | 0 | 2820 |
| 535 | AQEVARA | 1651 | GCGCAGGAGGTGGCGCGGGCT | 1652 | 2820 | 447 | 2374 |
| 536 | GSVGVVV | 1653 | GGTTCGGTGGGTGTGGTTGTG | 1654 | 2818 | 0 | 2818 |
| 537 | GGTLLTV | 1655 | GGTGGGACGTTGTTGACGGTG | 1656 | 2818 | 1284 | 1534 |
| 538 | ITENVSR | 1657 | ATCACGGAAAACGTAAGCCGT | 1658 | 2817 | 2270 | 546 |
| 539 | SAGVIMN | 1659 | TCGGCGGGTGTTATTATGAAT | 1660 | 2817 | 2287 | 529 |
| 540 | AEGLRGQ | 1661 | GCTGAGGGGCTTCGGGGGCAG | 1662 | 2814 | 2814 | 0 |
| 541 | GTGEIGM | 1663 | GGGACTGGTGAGATTGGTATG | 1664 | 2813 | 2813 | 0 |
| 542 | VLGAHET | 1665 | GTACTAGGAGCGCACGAAACA | 1666 | 2812 | 2000 | 812 |
| 543 | MALGYSS | 1667 | ATGGCGTTGGGGTATAGTAGT | 1668 | 2811 | 0 | 2811 |
| 544 | STVTGGP | 1669 | AGCACCGTCACGGGCGGACCC | 1670 | 2811 | 2811 | 0 |
| 545 | MQGENNK | 1671 | ATGCAGGGTGAGAATAATAAG | 1672 | 2810 | 936 | 1874 |
| 546 | AAAQTAT | 1673 | GCAGCAGCCCAAACCGCAACG | 1674 | 2810 | 1000 | 1810 |
| 547 | VNSGSVL | 1675 | GTGAATTCGGGTTCTGTGCTG | 1676 | 2808 | 2536 | 272 |
| 548 | HAAGDRS | 1677 | CATGCGGCGGGTGATCGTAGT | 1678 | 2806 | 1299 | 1508 |
| 549 | PVESQTA | 1679 | CCCGTTGAAAGCCAAACTGCC | 1680 | 2805 | 480 | 2325 |
| 550 | STIPSLM | 1681 | AGCACAATACCCTCATTAATG | 1682 | 2801 | 0 | 2801 |
| 551 | KNAGAES | 1683 | AAGAATGCGGGTGCTGAGAGT | 1684 | 2800 | 650 | 2150 |
| 552 | SPGSDSK | 1685 | TCTCCTGGTTCTGATTCGAAG | 1686 | 2795 | 679 | 2116 |
| 553 | KVTLEGD | 1687 | AAAGTCACACTAGAAGGTGAC | 1688 | 2793 | 2375 | 418 |
| 554 | PQGNSSV | 1689 | CCCCAAGGCAACAGCTCAGTC | 1690 | 2791 | 2565 | 226 |
| 555 | VLGTTTP | 1691 | GTGCTTGGGACGACTACGCCT | 1692 | 2791 | 2464 | 327 |
| 556 | LSNHGPI | 1693 | TTGTCTAACCACGGCCCCATA | 1694 | 2791 | 2791 | 0 |
| 557 | KENRVSD | 1695 | AAAGAAAACAGGGTAAGTGAC | 1696 | 2791 | 2791 | 0 |
| 558 | IGGNSGD | 1697 | ATTGGGGGGAATAGTGGGGAT | 1698 | 2788 | 1118 | 1670 |
| 559 | GAIGPAT | 1699 | GGGGCTATTGGTCCTGCTACT | 1700 | 2786 | 0 | 2786 |
| 560 | DTHAKSM | 1701 | GATACGCATGCTAAGAGTATG | 1702 | 2784 | 2784 | 0 |
| 561 | MNGGHHL | 1703 | ATGAATGGGGGTCATCATCTG | 1704 | 2783 | 718 | 2065 |
| 562 | AAGLIQN | 1705 | GCTGCCGGGCTGATACAAAAC | 1706 | 2780 | 2393 | 387 |
| 563 | QARDTKT | 1707 | CAAGCTCGAGACACCAAAACA | 1708 | 2780 | 2780 | 0 |
| 564 | SSYANEH | 1709 | AGTTCGTATGCTAATGAGCAT | 1710 | 2779 | 2659 | 120 |
| 565 | VLVSDRA | 1711 | GTGTTGGTTTCGGATCGTGCT | 1712 | 2778 | 778 | 2000 |
| 566 | WSTDGGS | 1713 | TGGTCAACGGACGGCGGGAGT | 1714 | 2773 | 0 | 2773 |
| 567 | CRESTCV | 1715 | TGTCGTGAGTCGACGTGTGTT | 1716 | 2772 | 2581 | 191 |
| 568 | SQAEGPV | 1717 | AGTCAAGCGGAAGGGCCCGTG | 1718 | 2764 | 0 | 2764 |
| 569 | ALSNDKH | 1719 | GCGCTTAGTAACGACAAACAC | 1720 | 2764 | 2208 | 556 |
| 570 | LGASVPM | 1721 | CTTGGTGCTTCGGTTCCGATG | 1722 | 2763 | 2242 | 521 |
| 571 | YSVGDSI | 1723 | TATTCTGTTGGGGATAGTATT | 1724 | 2762 | 2000 | 762 |
| 572 | QNSTGLW | 1725 | CAAAACTCCACAGGCCTCTGG | 1726 | 2757 | 2432 | 325 |
| 573 | LVAGQDL | 1727 | CTGGTGGCGGGGCAGGATTTG | 1728 | 2757 | 2757 | 0 |
| 574 | GLSEGSV | 1729 | GGCTTAAGCGAAGGCTCAGTA | 1730 | 2756 | 1401 | 1355 |
| 575 | TLAISEM | 1731 | ACTTTGGCGATTTCTGAGATG | 1732 | 2755 | 441 | 2314 |
| 576 | LVHTTNN | 1733 | CTAGTACACACAACCAACAAC | 1734 | 2753 | 2753 | 0 |
| 577 | TVVSSTR | 1735 | ACTGTTGTGTCTTCTACGAGG | 1736 | 2750 | 473 | 2277 |
| 578 | GRGPDLT | 1737 | GGCAGGGGACCAGACCTCACT | 1738 | 2748 | 631 | 2117 |
| 579 | IQSDHGR | 1739 | ATCCAAAGTGACCACGGACGC | 1740 | 2748 | 2748 | 0 |
| 580 | QSSEMRD | 1741 | CAATCGTCCGAAATGCGTGAC | 1742 | 2743 | 596 | 2147 |
| 581 | GSSENVS | 1743 | GGAAGCTCCGAAAACGTATCT | 1744 | 2740 | 2000 | 740 |
| 582 | KTPGVDP | 1745 | AAGACTCCGGGGGTGGATCCT | 1746 | 2740 | 2368 | 372 |
| 583 | QADDHGR | 1747 | CAGGCGGATGATCATGGTAGG | 1748 | 2739 | 709 | 2030 |
| 584 | AYSDGSS | 1749 | GCTTATAGTGATGGGTCGTCT | 1750 | 2738 | 1944 | 794 |
| 585 | MAASMTN | 1751 | ATGGCTGCCTCGATGACAAAC | 1752 | 2737 | 0 | 2737 |
| 586 | STIPTLT | 1753 | AGTACTATTCCTACTCTGACG | 1754 | 2733 | 0 | 2733 |
| 587 | AEVLNAL | 1755 | GCGGAGGTGCTGAATGCTTTG | 1756 | 2733 | 2444 | 289 |
| 588 | AESLSGL | 1757 | GCTGAGAGTTTGAGTGGGTTG | 1758 | 2730 | 1791 | 939 |
| 589 | NQGGGLT | 1759 | AACCAAGGTGGCGGCTTAACA | 1760 | 2730 | 2730 | 0 |
| 590 | AHNGGVQ | 1761 | GCTCATAATGGTGGTGTTCAG | 1762 | 2727 | 2587 | 140 |
| 591 | MGGSVTI | 1763 | ATGGGGGGTAGTGTTACGATT | 1764 | 2726 | 2726 | 0 |
| 592 | VSVSMGI | 1765 | GTTAGTGTGAGTATGGGCATC | 1766 | 2724 | 578 | 2146 |
| 593 | SGVAYER | 1767 | AGTGGGGTGGCTTATGAGAGG | 1768 | 2722 | 2274 | 448 |
| 594 | PSATQSL | 1769 | CCGTCTGCGACTCAGTCGTTG | 1770 | 2722 | 537 | 2185 |
| 595 | STGENKD | 1771 | TCCACGGGCGAAAACAAAGAC | 1772 | 2721 | 2657 | 64 |
| 596 | PTQGTLG | 1773 | CCTACTCAGGGGACGCTTGGG | 1774 | 2720 | 720 | 2000 |
| 597 | VLSADSV | 1775 | GTGCTTTCGGCTGATTCTGTG | 1776 | 2720 | 2720 | 0 |
| 598 | LGETLIR | 1777 | TTGGGGGAGACTCTGATTCGG | 1778 | 2718 | 2718 | 0 |
| 599 | EHLAGVV | 1779 | GAGCATTTGGCTGGTGTTGTT | 1780 | 2717 | 2600 | 116 |
| 600 | QSDNHGR | 1781 | CAAAGCGACAACCACGGGCGG | 1782 | 2716 | 2716 | 0 |
| 601 | LSVSQSA | 1783 | CTGAGTGTTTCTCAGTCGGCG | 1784 | 2714 | 2384 | 330 |
| 602 | SELSLGY | 1785 | AGCGAATTGAGTCTCGGCTAC | 1786 | 2713 | 2713 | 0 |
| 603 | AEDKANS | 1787 | GCTGAGGATAAGGCGAATAGT | 1788 | 2712 | 360 | 2352 |
| 604 | STINTLM | 1789 | TCGACAATAAACACCCTAATG | 1790 | 2711 | 1556 | 1155 |
| 605 | TGMTLGT | 1791 | ACGGGGATGACGCTGGGTACG | 1792 | 2708 | 1246 | 1462 |
| 606 | LNGGHVL | 1793 | TTGAATGGGGGTCATGTTCTG | 1794 | 2702 | 2460 | 242 |
| 607 | VVSDAGK | 1795 | GTGGTGAGTGATGCTGGGAAG | 1796 | 2700 | 317 | 2383 |
| 608 | MNPSNSM | 1797 | ATGAATCCTAGTAATTCGATG | 1798 | 2697 | 2572 | 125 |
| 609 | TAASIQS | 1799 | ACGGCCGCAAGCATACAATCC | 1800 | 2696 | 0 | 2696 |
| 610 | RGTEHLM | 1801 | CGTGGTACTGAGCATTTGATG | 1802 | 2695 | 219 | 2476 |
| 611 | LLADKSV | 1803 | CTTCTTGCTGATAAGAGTGTG | 1804 | 2695 | 473 | 2222 |
| 612 | PGEHNHA | 1805 | CCGGGTGAGCATAATCATGCT | 1806 | 2693 | 2436 | 256 |
| 613 | GTTSDTY | 1807 | GGTACTACGTCGGATACTTAT | 1808 | 2691 | 2400 | 291 |
| 614 | GDISARY | 1809 | GGTGATATTTCTGCGAGGTAT | 1810 | 2688 | 2000 | 688 |
| 615 | FSVSSLS | 1811 | TTCTCCGTCTCAAGTTTATCC | 1812 | 2688 | 688 | 2000 |
| 616 | TSDRDQY | 1813 | ACTAGTGATCGGGATCAGTAT | 1814 | 2688 | 2339 | 349 |
| 617 | AHVHVKE | 1815 | GCGCATGTTCATGTGAAGGAG | 1816 | 2688 | 2688 | 0 |
| 618 | GRDLSTA | 1817 | GGTCGGGATCTTTCGACTGCT | 1818 | 2687 | 680 | 2007 |
| 619 | GGGTEFY | 1819 | GGAGGAGGCACTGAATTCTAC | 1820 | 2683 | 2683 | 0 |
| 620 | PYPSNSH | 1821 | CCGTATCCGAGTAATTCGCAT | 1822 | 2682 | 2682 | 0 |
| 621 | NLGVGQM | 1823 | AATTTGGGTGTGGGTCAGATG | 1824 | 2680 | 2529 | 151 |
| 622 | LSPGTDK | 1825 | CTGTCGCCGGGGACGGATAAG | 1826 | 2680 | 2362 | 318 |
| 623 | GTDRVSR | 1827 | GGCACAGACAGAGTATCCCGT | 1828 | 2679 | 2679 | 0 |
| 624 | MADGASM | 1829 | ATGGCGGATGGTGCGTCTATG | 1830 | 2678 | 587 | 2091 |
| 625 | AGISNQT | 1831 | GCCGGAATCTCTAACCAAACT | 1832 | 2676 | 2520 | 156 |
| 626 | ETQGRQF | 1833 | GAGACTCAGGGTCGTCAGTTT | 1834 | 2675 | 284 | 2391 |
| 627 | YGSNDLS | 1835 | TATGGGAGTAATGATCTGAGT | 1836 | 2674 | 2262 | 412 |
| 628 | AADNNRW | 1837 | GCTGCTGATAATAATAGGTGG | 1838 | 2674 | 326 | 2348 |
| 629 | MPSNGQV | 1839 | ATGCCGTCTAATGGGCAGGTT | 1840 | 2674 | 674 | 2000 |
| 630 | GFGDGTR | 1841 | GGCTTCGGAGACGGTACACGC | 1842 | 2674 | 2674 | 0 |
| 631 | RLNEHEA | 1843 | AGGTTAAACGAACACGAAGCC | 1844 | 2671 | 2620 | 51 |
| 632 | SVKSVTL | 1845 | AGTGTGAAGAGTGTGACGCTT | 1846 | 2667 | 2000 | 667 |
| 633 | LTDGYTP | 1847 | CTGACCGACGGTTACACACCG | 1848 | 2667 | 2357 | 310 |
| 634 | SNIGNDR | 1849 | TCGAATATTGGGAATGATAGG | 1850 | 2666 | 362 | 2304 |
| 635 | KESTLST | 1851 | AAAGAAAGTACCCTCTCAACA | 1852 | 2666 | 896 | 1770 |
| 636 | RVDPAQL | 1853 | AGGGTGGATCCGGCGCAGCTT | 1854 | 2666 | 2000 | 666 |
| 637 | MYGESAK | 1855 | ATGTACGGGGAAAGCGCTAAA | 1856 | 2665 | 2665 | 0 |
| 638 | VAEGGQI | 1857 | GTGGCGGAGGGTGGGCAGATT | 1858 | 2664 | 489 | 2175 |
| 639 | LTDRVSR | 1859 | CTAACCGACAGAGTCTCTCGA | 1860 | 2664 | 0 | 2664 |
| 640 | RLDELMI | 1861 | CGATTGGACGAACTAATGATC | 1862 | 2663 | 0 | 2663 |
| 641 | PVKEYES | 1863 | CCGGTGAAGGAGTATGAGTCG | 1864 | 2661 | 1040 | 1621 |
| 642 | QGGDSGG | 1865 | CAAGGGGGAGACTCAGGTGGC | 1866 | 2657 | 2543 | 114 |
| 643 | VHTEAPY | 1867 | GTTCATACGGAGGCTCCGTAT | 1868 | 2651 | 0 | 2651 |
| 644 | SQELRDR | 1869 | AGTCAGGAGCTGAGGGATCGT | 1870 | 2650 | 2516 | 134 |
| 645 | VSRENVS | 1871 | GTCTCGCGTGAAAACGTTTCC | 1872 | 2648 | 2648 | 0 |
| 646 | STDLSEL | 1873 | TCTACGGATTTGTCGGAGTTG | 1874 | 2645 | 2501 | 144 |
| 647 | GTGIQTR | 1875 | GGCACAGGAATCCAAACACGT | 1876 | 2643 | 2000 | 643 |
| 648 | ADSDYTE | 1877 | GCAGACTCCGACTACACAGAA | 1878 | 2642 | 2000 | 642 |
| 649 | VDTSARD | 1879 | GTCGACACGTCTGCAAGAGAC | 1880 | 2641 | 0 | 2641 |
| 650 | LGNKDGV | 1881 | TTGGGGAATAAGGATGGTGTT | 1882 | 2641 | 641 | 2000 |
| 651 | REAGTNS | 1883 | CGGGAGGCTGGGACGAATTCT | 1884 | 2640 | 2640 | 0 |
| 652 | PGATNNP | 1885 | CCGGGTGCGACGAATAATCCG | 1886 | 2636 | 1686 | 950 |
| 653 | NSISLIN | 1887 | AACTCTATCAGCCTCATAAAC | 1888 | 2636 | 2000 | 636 |
| 654 | ASSEFKI | 1889 | GCCTCATCCGAATTCAAAATA | 1890 | 2635 | 2328 | 307 |
| 655 | VTTGSPV | 1891 | GTTACGACTGGGTCGCCGGTA | 1892 | 2633 | 2078 | 555 |
| 656 | GSTNVNV | 1893 | GGTAGTACGAATGTTAATGTG | 1894 | 2631 | 0 | 2631 |
| 657 | GDMSGSL | 1895 | GGGGATATGAGTGGGAGTTTG | 1896 | 2631 | 2631 | 0 |
| 658 | SRTDSGP | 1897 | AGTCGTACGGATTCGGGGCCG | 1898 | 2630 | 2000 | 630 |
| 659 | EKGSTLV | 1899 | GAGAAGGGGTCGACGTTGGTG | 1900 | 2629 | 629 | 2000 |
| 660 | GHATDSV | 1901 | GGTCATGCTACTGATAGTGTG | 1902 | 2628 | 628 | 2000 |
| 661 | VSNGTFV | 1903 | GTGTCGAACGGAACGTTCGTA | 1904 | 2626 | 2000 | 626 |
| 662 | SAGGSLQ | 1905 | TCGGCAGGAGGTAGCCTACAA | 1906 | 2626 | 0 | 2626 |
| 663 | HDTSDSV | 1907 | CATGATACTAGTGATAGTGTT | 1908 | 2626 | 467 | 2160 |
| 664 | AAGVSLN | 1909 | GCGGCGGGTGTTAGTCTGAAT | 1910 | 2626 | 2626 | 0 |
| 665 | NTVTNIL | 1911 | AACACCGTCACGAACATCCTC | 1912 | 2624 | C | 2624 |
| 666 | KSHSENN | 1913 | AAATCACACTCAGAAAACAAC | 1914 | 2624 | 1458 | 1166 |
| 667 | RNHDLTH | 1915 | AGGAATCATGATCTGACTCAT | 1916 | 2624 | 2624 | 0 |
| 668 | VKDGPGT | 1917 | GTGAAAGACGGACCCGGTACG | 1918 | 2623 | 2340 | 283 |
| 669 | VVVGNVK | 1919 | GTTGTTGTTGGTAATGTGAAG | 1920 | 2623 | 2623 | 0 |
| 670 | AGGGDTR | 1921 | GCTGGTGGGGGCGACACACGT | 1922 | 2623 | 2623 | 0 |
| 671 | KSISGEW | 1923 | AAGAGTATTTCGGGTGAGTGG | 1924 | 2622 | 622 | 2000 |
| 672 | ASADSRS | 1925 | GCTTCGGCGGATTCTCGTAGT | 1926 | 2620 | 436 | 2184 |
| 673 | SVAQNQT | 1927 | TCCGTAGCTCAAAACCAAACT | 1928 | 2620 | 620 | 2000 |
| 674 | DRASSDA | 1929 | GACAGGGCTTCATCAGACGCC | 1930 | 2620 | 2481 | 139 |
| 675 | PVRDTKT | 1931 | CCGGTGCGTGATACTAAGACT | 1932 | 2620 | 1696 | 924 |
| 676 | GVGNTNI | 1933 | GGTGTGGGGAATACTAATATT | 1934 | 2619 | 2466 | 154 |
| 677 | GARLTYT | 1935 | GGAGCCCGCCTCACTTACACA | 1936 | 2619 | 750 | 1869 |
| 678 | TSLGLMV | 1937 | ACGAGTCTGGGTCTTATGGTG | 1938 | 2618 | 0 | 2618 |
| 679 | KAVDNGL | 1939 | AAGGCTGTTGATAATGGGCTG | 1940 | 2616 | 616 | 2000 |
| 680 | AHEAGSR | 1941 | GCTCATGAGGCGGGTAGTCGT | 1942 | 2615 | 2525 | 90 |
| 681 | ASQDRGL | 1943 | GCTTCGCAGGATAGGGGGTTG | 1944 | 2611 | 128 | 2483 |
| 682 | SVTDIKH | 1945 | TCTGTTACTGATATTAAGCAT | 1946 | 2609 | 2000 | 609 |
| 683 | ISNGTER | 1947 | ATATCAAACGGAACAGAACGC | 1948 | 2608 | 0 | 2608 |
| 684 | GHQNGGI | 1949 | GGGCACCAAAACGGCGGAATC | 1950 | 2608 | 779 | 1828 |
| 685 | GNGTGVI | 1951 | GGTAATGGGACTGGTGTGATT | 1952 | 2607 | 2524 | 83 |
| 686 | AKTNDSN | 1953 | GCGAAGACGAATGATAGTAAT | 1954 | 2605 | 2028 | 577 |
| 687 | GMATQTT | 1955 | GGGATGGCTACTCAGACGACT | 1956 | 2602 | 0 | 2602 |
| 688 | SSDTTLR | 1957 | AGTTCGGATACTACTTTGCGT | 1958 | 2602 | 2392 | 209 |
| 689 | LVDDKAH | 1959 | TTGGTTGATGATAAGGCGCAT | 1960 | 2602 | 2003 | 599 |
| 690 | TLAISQP | 1961 | ACCTTAGCCATATCGCAACCT | 1962 | 2600 | 2430 | 170 |
| 691 | AGFSSQS | 1963 | GCGGGGTTTAGTTCTCAGTCG | 1964 | 2597 | 2000 | 597 |
| 692 | ILIGTSP | 1965 | ATTCTTATTGGTACTTCGCCG | 1966 | 2597 | 356 | 2242 |
| 693 | SMESSSR | 1967 | TCTATGGAAAGCAGTTCGCGT | 1968 | 2596 | 2278 | 318 |
| 694 | ARSEFKT | 1969 | GCGAGGTCTGAGTTTAAGACT | 1970 | 2595 | 2595 | 0 |
| 695 | NKSDHEF | 1971 | AACAAATCAGACCACGAATTC | 1972 | 2594 | 2466 | 128 |
| 696 | VEVPTAN | 1973 | GTTGAAGTGCCAACAGCGAAC | 1974 | 2593 | 369 | 2224 |
| 697 | LLTSAVA | 1975 | CTGCTTACATCGGCTGTTGCC | 1976 | 2592 | 2355 | 237 |
| 698 | MGGVSNP | 1977 | ATGGGGGGGGTTAGTAATCCG | 1978 | 2592 | 592 | 2000 |
| 699 | LGDSASP | 1979 | CTTGGGGATTCTGCTTCGCCG | 1980 | 2587 | 2000 | 587 |
| 700 | MVGGGVS | 1981 | ATGGTGGGTGGTGGGGTGTCG | 1982 | 2587 | 587 | 2000 |
| 701 | ASQLTQT | 1983 | GCGTCTCAGCTTACTCAGACT | 1984 | 2587 | 2476 | 111 |
| 702 | LSNMMSV | 1985 | CTGTCTAATATGATGAGTGTT | 1986 | 2586 | 2580 | 7 |
| 703 | MYVAHSS | 1987 | ATGTATGTTGCTCATAGTTCG | 1988 | 2585 | 399 | 2186 |
| 704 | THDPIQR | 1989 | ACTCATGATCCGATTCAGCGT | 1990 | 2585 | 2322 | 263 |
| 705 | HQDRTTL | 1991 | CATCAGGATAGGACGACGCTT | 1992 | 2584 | 2000 | 584 |
| 706 | GTLERTA | 1993 | GGGACGTTGGAACGTACGGCC | 1994 | 2581 | 1389 | 1192 |
| 707 | IVDVTAR | 1995 | ATAGTGGACGTTACTGCTCGG | 1996 | 2580 | 482 | 2098 |
| 708 | IFNTTNT | 1997 | ATTTTTAATACTACGAATACT | 1998 | 2580 | 580 | 2000 |
| 709 | AKLLDSL | 1999 | GCAAAACTCCTCGACAGCCTT | 2000 | 2580 | 1008 | 1572 |
| 710 | WDDSKDR | 2001 | TGGGACGACTCAAAAGACAGA | 2002 | 2579 | 356 | 2223 |
| 711 | MLRGYSQ | 2003 | ATGCTTAGGGGTTATAGTCAG | 2004 | 2578 | 0 | 2578 |
| 712 | QDGMLTR | 2005 | CAAGACGGTATGTTGACAAGG | 2006 | 2578 | 803 | 1775 |
| 713 | LANMLNV | 2007 | CTGGCTAATATGTTGAATGTT | 2008 | 2576 | 0 | 2576 |
| 714 | PYEGAGT | 2009 | CCGTACGAAGGCGCAGGTACT | 2010 | 2576 | 450 | 2126 |
| 715 | MDGKSPP | 2011 | ATGGATGGGAAGTCGCCGCCG | 2012 | 2576 | 2576 | 0 |
| 716 | GQAGTYS | 2013 | GGCCAAGCGGGTACCTACTCG | 2014 | 2575 | 2575 | 0 |
| 717 | MDGKSPT | 2015 | ATGGACGGAAAAAGTCCAACA | 2016 | 2574 | 1016 | 1558 |
| 718 | VMTVETS | 2017 | GTGATGACCGTCGAAACCTCG | 2018 | 2574 | 2250 | 324 |
| 719 | VQMTLHK | 2019 | GTTCAGATGACGCTTCATAAG | 2020 | 2572 | 0 | 2572 |
| 720 | VEWKHPL | 2021 | GTGGAGTGGAAGCATCCTTTG | 2022 | 2571 | 1929 | 642 |
| 721 | RGAESSE | 2023 | CGTGGTGCCGAAAGCAGTGAA | 2024 | 2571 | 571 | 2000 |
| 722 | LSNMLSV | 2025 | CTGTCTAATATGTTGAGTGTT | 2026 | 2570 | 570 | 2000 |
| 723 | ELVATTI | 2027 | GAGCTTGTGGCTACTACTATT | 2028 | 2570 | 2000 | 570 |
| 724 | LAGLGGP | 2029 | CTCGCAGGCCTTGGTGGCCCC | 2030 | 2567 | 373 | 2194 |
| 725 | RISHEGT | 2031 | CGCATATCCCACGAAGGAACT | 2032 | 2567 | 0 | 2567 |
| 726 | TAAGIDR | 2033 | ACTGCTGCGGGGATTGATCGG | 2034 | 2566 | 1487 | 1079 |
| 727 | FAEVAQA | 2035 | TTCGCCGAAGTAGCCCAAGCT | 2036 | 2566 | 0 | 2566 |
| 728 | GPAEGQG | 2037 | GGGCCAGCCGAAGGACAAGGT | 2038 | 2565 | 0 | 2565 |
| 729 | GAADRQI | 2039 | GGCGCAGCAGACCGACAAATA | 2040 | 2565 | 2298 | 266 |
| 730 | AVSGYTV | 2041 | GCAGTGTCAGGGTACACGGTT | 2042 | 2564 | 1754 | 811 |
| 731 | IANLADS | 2043 | ATTGCGAATCTTGCTGATTCG | 2044 | 2564 | 304 | 2260 |
| 732 | TSYDKLV | 2045 | ACGTCGTATGATAAGTTGGTT | 2046 | 2562 | 498 | 2065 |
| 733 | FQDTIGV | 2047 | TTTCAGGATACGATTGGGGTG | 2048 | 2562 | 1161 | 1401 |
| 734 | TNGGEGA | 2049 | ACTAATGGGGGTGAGGGGGCG | 2050 | 2560 | 0 | 2560 |
| 735 | IAQNTPY | 2051 | ATCGCACAAAACACACCCTAC | 2052 | 2558 | 1334 | 1224 |
| 736 | QVHDTKT | 2053 | CAAGTCCACGACACAAAAACG | 2054 | 2558 | 421 | 2136 |
| 737 | RLNEHEA | 2055 | CGTCTGAATGAGCATGAGGCG | 2056 | 2557 | 1782 | 775 |
| 738 | AGSGTEV | 2057 | GCGGGTTCTGGGACTGAGGTT | 2058 | 2557 | 1949 | 608 |
| 739 | IVIAEIH | 2059 | ATTGTGATTGCTGAGATTCAT | 2060 | 2554 | 624 | 1930 |
| 740 | QVRETKT | 2061 | CAAGTTAGGGAAACCAAAACC | 2062 | 2553 | 2226 | 327 |
| 741 | SVNSGLL | 2063 | AGTGTTAATAGTGGGCTGCTT | 2064 | 2551 | 2348 | 203 |
| 742 | VGVNGSH | 2065 | GTGGGTGTGAATGGTTCTCAT | 2066 | 2550 | 2274 | 276 |
| 743 | AAAQSAT | 2067 | GCAGCAGCACAATCGGCAACG | 2068 | 2549 | 2379 | 170 |
| 744 | SKAEGPV | 2069 | TCGAAGGCTGAGGGTCCGGTT | 2070 | 2548 | 2000 | 548 |
| 745 | AGLQVSI | 2071 | GCCGGTTTACAAGTCAGCATC | 2072 | 2547 | 2547 | 0 |
| 746 | QNERITV | 2073 | CAGAATGAGAGGATTACTGTG | 2074 | 2546 | 2000 | 546 |
| 747 | QEKGTST | 2075 | CAAGAAAAAGGAACCTCGACG | 2076 | 2544 | 767 | 1777 |
| 748 | SHGSDSK | 2077 | TCGCACGGCTCCGACTCTAAA | 2078 | 2543 | 2543 | 0 |
| 749 | RMENGNT | 2079 | AGAATGGAAAACGGTAACACC | 2080 | 2542 | 0 | 2542 |
| 750 | LGVEVGA | 2081 | TTGGGTGTGGAGGTTGGGGCG | 2082 | 2542 | 482 | 2060 |
| 751 | TTGPSNA | 2083 | ACTACTGGGCCGAGTAACGCC | 2084 | 2542 | 2000 | 542 |
| 752 | RDLDGKY | 2085 | AGGGACCTTGACGGAAAATAC | 2086 | 2542 | 2542 | 0 |
| 753 | MDTHTNT | 2087 | ATGGACACCCACACAAACACA | 2088 | 2541 | 541 | 2000 |
| 754 | SLINTGS | 2089 | TCACTCATCAACACAGGTTCT | 2090 | 2540 | 540 | 2000 |
| 755 | KSISGEW | 2091 | AAAAGCATCTCTGGCGAATGG | 2092 | 2538 | 2184 | 354 |
| 756 | GVNHAVA | 2093 | GGTGTTAATCATGCGGTGGCT | 2094 | 2538 | 2237 | 301 |
| 757 | AGEHYQA | 2095 | GCAGGCGAACACTACCAAGCG | 2096 | 2538 | 2538 | 0 |
| 758 | TTGLTGS | 2097 | ACGACGGGGCTGACTGGTAGT | 2098 | 2535 | 2000 | 535 |
| 759 | PTQGTLQ | 2099 | CCGACCCAAGGTACCTTGCAA | 2100 | 2535 | 2261 | 274 |
| 760 | GGTQAVL | 2101 | GGTGGGACTCAGGCTGTGCTG | 2102 | 2534 | 2392 | 142 |
| 761 | AADVILN | 2103 | GCTGCCGACGTCATCCTTAAC | 2104 | 2534 | 2534 | 0 |
| 762 | ITTGPGG | 2105 | ATTACGACGGGTCCTGGGGGT | 2106 | 2533 | 1242 | 1290 |
| 763 | TTLAGPA | 2107 | ACTACTCTGGCTGGTCCTGCG | 2108 | 2533 | 2533 | 0 |
| 764 | NNGTLPI | 2109 | AATAATGGTACTTTGCCGATT | 2110 | 2532 | 754 | 1779 |
| 765 | IDSLNSV | 2111 | ATAGACAGTCTGAACTCCGTC | 2112 | 2529 | 2387 | 142 |
| 766 | GAASSTK | 2113 | GGCGCAGCATCGTCCACAAAA | 2114 | 2528 | 0 | 2528 |
| 767 | ELRVKDT | 2115 | GAGCTTAGGGTTAAGGATACT | 2116 | 2528 | 296 | 2232 |
| 768 | MGASATL | 2117 | ATGGGTGCATCCGCAACCTTG | 2118 | 2527 | 2000 | 527 |
| 769 | YGTVVET | 2119 | TACGGAACAGTGGTGGAAACG | 2120 | 2527 | 2000 | 527 |
| 770 | GTLVSEL | 2121 | GGTACGTTGGTGTCGGAGCTG | 2122 | 2522 | 2000 | 522 |
| 771 | ATGTESR | 2123 | GCAACAGGGACCGAATCAAGG | 2124 | 2520 | 305 | 2215 |
| 772 | NGGIGGF | 2125 | AATGGTGGGATTGGTGGTTTT | 2126 | 2520 | 473 | 2047 |
| 773 | LADNHGR | 2127 | CTGGCGGATAATCATGGTAGG | 2128 | 2520 | 520 | 2000 |
| 774 | TSASVSQ | 2129 | ACTTCTGCTTCTGTTTCTCAG | 2130 | 2518 | 518 | 2000 |
| 775 | GNSGGDF | 2131 | GGAAACAGCGGTGGGGACTTC | 2132 | 2518 | 2518 | 0 |
| 776 | TYEDLRV | 2133 | ACTTATGAGGATCTTAGGGTG | 2134 | 2518 | 2518 | 0 |
| 777 | RDASITI | 2135 | CGAGACGCCTCGATAACAATA | 2136 | 2516 | 361 | 2155 |
| 778 | GAQVNGT | 2137 | GGTGCACAAGTAAACGGTACA | 2138 | 2516 | 1595 | 921 |
| 779 | RMTGDLT | 2139 | AGGATGACGGGTGATTTGACT | 2140 | 2514 | 2190 | 324 |
| 780 | ITSEPLP | 2141 | ATCACATCCGAACCCCTACCT | 2142 | 2513 | 0 | 2513 |
| 781 | TLAISEL | 2143 | ACGCTTGCTATCAGCGAATTG | 2144 | 2509 | 2140 | 369 |
| 782 | ASLLNKT | 2145 | GCCAGCTTACTCAACAAAACG | 2146 | 2509 | 2000 | 509 |
| 783 | RDYAEQP | 2147 | CGCGACTACGCTGAACAACCT | 2148 | 2509 | 2382 | 126 |
| 784 | ARVDTGI | 2149 | GCGCGTGTAGACACGGGGATA | 2150 | 2508 | 2000 | 508 |
| 785 | EGKTQLQ | 2151 | GAGGGTAAGACTCAGCTGCAG | 2152 | 2508 | 2508 | 0 |
| 786 | VGNDERP | 2153 | GTTGGGAATGATGAGCGTCCG | 2154 | 2507 | 333 | 2175 |
| 787 | LSLSKDK | 2155 | CTGAGTCTTAGTAAGGATAAG | 2156 | 2507 | 2507 | 0 |
| 788 | ISLDATS | 2157 | ATAAGCCTCGACGCTACATCT | 2158 | 2506 | 2000 | 506 |
| 789 | GTMSPGA | 2159 | GGTACTATGTCTCCTGGGGCT | 2160 | 2506 | 2506 | 0 |
| 790 | GSGERPV | 2161 | GGAAGTGGTGAAAGGCCGGTA | 2162 | 2504 | 2000 | 504 |
| 791 | AGEHYQA | 2163 | GCGGGTGAGCATTATCAGGCT | 2164 | 2504 | 2504 | 0 |
| 792 | RNEGINQ | 2165 | CGTAATGAGGGTATTAATCAG | 2166 | 2502 | 2188 | 314 |
| 793 | GMGASSK | 2167 | GGTATGGGGGCGTCTTCTAAG | 2168 | 2502 | 2389 | 113 |
| 794 | QLVAQDR | 2169 | CAGTTGGTGGCGCAGGATCGG | 2170 | 2500 | 851 | 1649 |
| 795 | TTADIVR | 2171 | ACGACGGCGGATATTGTTAGG | 2172 | 2498 | 332 | 2167 |
| 796 | YTVTGTI | 2173 | TACACCGTAACTGGCACAATC | 2174 | 2498 | 498 | 2000 |
| 797 | GNGTGVL | 2175 | GGTAATGGGACTGGTGTGCTT | 2176 | 2497 | 2363 | 134 |
| 798 | PIHGASS | 2177 | CCAATACACGGGGCGTCATCT | 2178 | 2496 | 2001 | 495 |
| 799 | DSHASGD | 2179 | GATAGTCATGCGTCGGGGGAT | 2180 | 2496 | 2496 | 0 |
| 800 | PNERHTV | 2181 | CCGAATGAGAGGCATACTGTG | 2182 | 2494 | 1581 | 913 |
| 801 | NRLGDRI | 2183 | AACAGGCTGGGCGACCGACTA | 2184 | 2494 | 2322 | 172 |
| 802 | LLQSLND | 2185 | CTCCTACAATCGCTGAACGAC | 2186 | 2494 | 2000 | 494 |
| 803 | DRAELRL | 2187 | GACCGGGCAGAACTAAGGCTT | 2188 | 2493 | 0 | 2493 |
| 804 | RNFSVVL | 2189 | CGGAACTTCAGTGTAGTACTG | 2190 | 2492 | 1945 | 547 |
| 805 | IAGVPQA | 2191 | ATTGCGGGGGTTCCGCAGGCG | 2192 | 2492 | 2491 | 1 |
| 806 | EPSLSSP | 2193 | GAGCCGTCTCTGAGTTCTCCG | 2194 | 2492 | 492 | 2000 |
| 807 | LNGGHVM | 2195 | TTGAATGGGGGTCATGTTATG | 2196 | 2492 | 2171 | 321 |
| 808 | RDLNSDV | 2197 | AGGGACCTTAACTCGGACGTC | 2198 | 2491 | 2274 | 217 |
| 809 | PGQHNQA | 2199 | CCAGGACAACACAACCAAGCC | 2200 | 2490 | 307 | 2183 |
| 810 | GVEGSGM | 2201 | GGGGTGGAAGGCTCCGGAATG | 2202 | 2490 | 1263 | 1227 |
| 811 | QADNNGR | 2203 | CAAGCTGACAACAACGGCCGC | 2204 | 2490 | 2490 | 0 |
| 812 | ADAGIMM | 2205 | GCGGACGCCGGCATCATGATG | 2206 | 2486 | 553 | 1933 |
| 813 | DRADDSR | 2207 | GATAGGGCTGATGATTCTCGT | 2208 | 2486 | 2486 | C |
| 814 | DQTYTSA | 2209 | GACCAAACATACACAAGCGCG | 2210 | 2485 | 2485 | 0 |
| 815 | GVRDTNI | 2211 | GGAGTTCGAGACACAAACATA | 2212 | 2483 | 383 | 2100 |
| 816 | MSVATQR | 2213 | ATGTCAGTCGCGACTCAACGA | 2214 | 2483 | 483 | 2000 |
| 817 | PALEANI | 2215 | CCGGCTCTTGAGGCTAATATT | 2216 | 2482 | 1623 | 858 |
| 818 | VLNEHVA | 2217 | GTCCTTAACGAACACGTAGCT | 2218 | 2482 | 0 | 2482 |
| 819 | GLNEHQA | 2219 | GGTCTGAATGAGCATCAGGCG | 2220 | 2482 | 0 | 2482 |
| 820 | SLDSLTS | 2221 | AGTTTAGACAGCTTAACCAGT | 2222 | 2482 | 2345 | 137 |
| 821 | WTDRESL | 2223 | TGGACTGATCGGGAGTCGCTG | 2224 | 2481 | 2481 | C |
| 822 | DVGTGAL | 2225 | GATGTTGGGACTGGGGCGTTG | 2226 | 2481 | 2481 | 0 |
| 823 | VGHVESP | 2227 | GTAGGCCACGTCGAATCTCCA | 2228 | 2480 | 0 | 2480 |
| 824 | KGSDTAM | 2229 | AAAGGGTCAGACACAGCCATG | 2230 | 2480 | 0 | 2480 |
| 825 | KLSSEKT | 2231 | AAGCTTTCGAGTGAGAAGACT | 2232 | 2478 | 2366 | 112 |
| 826 | VGLSRDL | 2233 | GTTGGGCTGAGTCGGGATCTG | 2234 | 2477 | 0 | 2477 |
| 827 | VSNAVGQ | 2235 | GTTTCGAATGCTGTGGGTCAG | 2236 | 2477 | 2477 | 0 |
| 828 | LSNHGSV | 2237 | TTGAGCAACCACGGATCGGTA | 2238 | 2476 | 394 | 2083 |
| 829 | GAPSLGD | 2239 | GGGGCGCCGTCGTTGGGTGAT | 2240 | 2476 | 2000 | 476 |
| 830 | MNGAHVL | 2241 | ATGAACGGCGCGCACGTATTG | 2242 | 2475 | 2475 | 0 |
| 831 | NGNMASY | 2243 | AACGGAAACATGGCAAGTTAC | 2244 | 2472 | 1620 | 852 |
| 832 | IAQMHSS | 2245 | ATCGCACAAATGCACAGTTCC | 2246 | 2470 | 606 | 1864 |
| 833 | PTTLGHD | 2247 | CCGACAACTCTCGGACACGAC | 2248 | 2470 | 2470 | 0 |
| 834 | QANMLSD | 2249 | CAAGCCAACATGCTCTCAGAC | 2250 | 2469 | 1614 | 856 |
| 835 | WANGNTV | 2251 | TGGGCGAATGGGAATACGGTG | 2252 | 2468 | 2000 | 468 |
| 836 | EEKSASY | 2253 | GAGGAGAAGTCGGCTTCTTAT | 2254 | 2468 | 1731 | 736 |
| 837 | VSPAASV | 2255 | GTTAGTCCTGCTGCGAGTGTT | 2256 | 2468 | 2468 | 0 |
| 838 | ARSLGEV | 2257 | GCGAGGTCGCTTGGGGAGGTT | 2258 | 2467 | 467 | 2000 |
| 839 | MDVSSGP | 2259 | ATGGATGTGAGTAGTGGTCCG | 2260 | 2465 | 2000 | 465 |
| 840 | ISNYTRL | 2261 | ATATCTAACTACACGCGGCTT | 2262 | 2464 | 2000 | 464 |
| 841 | PDERLTV | 2263 | CCTGACGAACGGCTAACGGTT | 2264 | 2463 | 2463 | 0 |
| 842 | TDALKSK | 2265 | ACCGACGCCCTAAAAAGCAAA | 2266 | 2462 | 2462 | 0 |
| 843 | ATDSTQS | 2267 | GCCACCGACAGCACTCAAAGC | 2268 | 2462 | 2462 | 0 |
| 844 | SSLLTTA | 2269 | TCGTCGTTGCTGACTACTGCT | 2270 | 2461 | 603 | 1858 |
| 845 | VLTSPGP | 2271 | GTTCTGACTTCGCCTGGTCCT | 2272 | 2460 | 0 | 2460 |
| 846 | DSHVSGM | 2273 | GATAGTCATGTGTCGGGGATG | 2274 | 2459 | 237 | 2222 |
| 847 | NDSAANS | 2275 | AACGACTCTGCTGCGAACTCC | 2276 | 2459 | 2459 | 0 |
| 848 | ALGVAVA | 2277 | GCTCTTGGGGTTGCTGTTGCT | 2278 | 2458 | 0 | 2458 |
| 849 | GTAGHMS | 2279 | GGGACTGCTGGGCATATGTCG | 2280 | 2457 | 457 | 2000 |
| 850 | NNLGDRL | 2281 | AACAACCTGGGCGACAGGCTC | 2282 | 2456 | 1937 | 519 |
| 851 | LGAGSPN | 2283 | CTAGGCGCCGGAAGCCCGAAC | 2284 | 2456 | 2456 | 0 |
| 852 | SGSNTGT | 2285 | TCGGGGTCTAATACGGGTACT | 2286 | 2455 | 5 | 2450 |
| 853 | GVGASEK | 2287 | GGTGTGGGGGCTAGTGAGAAG | 2288 | 2455 | 472 | 1984 |
| 854 | MSNVGTW | 2289 | ATGAGTAACGTAGGCACATGG | 2290 | 2455 | 2000 | 455 |
| 855 | IVMAENN | 2291 | ATCGTAATGGCGGAAAACAAC | 2292 | 2454 | 0 | 2454 |
| 856 | HVDLGTK | 2293 | CACGTTGACTTAGGCACAAAA | 2294 | 2452 | 224 | 2228 |
| 857 | PNERVTV | 2295 | CCGAATGAGAGGGTTACTGTG | 2296 | 2452 | 2373 | 79 |
| 858 | DRDTNPY | 2297 | GACCGAGACACCAACCCATAC | 2298 | 2452 | 452 | 2000 |
| 859 | DGGLPKS | 2299 | GACGGAGGCTTACCCAAAAGC | 2300 | 2452 | 1419 | 1033 |
| 860 | RISQDGD | 2301 | AGAATATCCCAAGACGGAGAC | 2302 | 2451 | 0 | 2451 |
| 861 | AVLAGTR | 2303 | GCGGTTCTGGCGGGGACTAGG | 2304 | 2450 | 2000 | 450 |
| 862 | KASDTPM | 2305 | AAAGCAAGTGACACGCCCATG | 2306 | 2450 | 2450 | 0 |
| 863 | GNDVGRS | 2307 | GGGAACGACGTAGGCCGCTCG | 2308 | 2446 | 0 | 2446 |
| 864 | STLSGTD | 2309 | TCGACGCTGTCTGGTACTGAT | 2310 | 2446 | 1766 | 680 |
| 865 | FSSEQLT | 2311 | TTTTCGTCTGAGCAGCTTACG | 2312 | 2445 | 0 | 2445 |
| 866 | SHLGDRL | 2313 | AGTCATCTTGGTGATCGTTTG | 2314 | 2443 | 2000 | 444 |
| 867 | AVKEYQS | 2315 | GCTGTTAAAGAATACCAATCT | 2316 | 2443 | 0 | 2443 |
| 868 | MGTPTNT | 2317 | ATGGGTACTCCTACGAATACG | 2318 | 2443 | 0 | 2443 |
| 869 | QSLATGI | 2319 | CAGTCGCTTGCTACTGGGATT | 2320 | 2442 | 921 | 1522 |
| 870 | PGVAMVS | 2321 | CCTGGGGTAGCAATGGTATCT | 2322 | 2442 | 2000 | 442 |
| 871 | SAETRNG | 2323 | TCTGCGGAGACTAGGAATGGG | 2324 | 2441 | 335 | 2106 |
| 872 | EGGYSGR | 2325 | GAGGGTGGTTATAGTGGGCGT | 2326 | 2440 | 2000 | 440 |
| 873 | ETEASSR | 2327 | GAGACGGAGGCGAGTTCGCGT | 2328 | 2440 | 2440 | 0 |
| 874 | STHHTST | 2329 | TCGACGCACCACACCAGTACG | 2330 | 2439 | 2000 | 439 |
| 875 | REMPLSH | 2331 | AGGGAGATGCCTTTGAGTCAT | 2332 | 2438 | 2345 | 93 |
| 876 | RELQSAA | 2333 | CGCGAATTACAAAGCGCAGCT | 2334 | 2437 | 2000 | 437 |
| 877 | GSGSGVL | 2335 | GGTTCTGGGTCGGGGGTGCTG | 2336 | 2437 | 1925 | 512 |
| 878 | GVLTTVT | 2337 | GGAGTCTTGACCACTGTTACG | 2338 | 2433 | 0 | 2433 |
| 879 | NLQGNAH | 2339 | AATCTGCAGGGTAATGCTCAT | 2340 | 2432 | 1160 | 1271 |
| 880 | AAISSQT | 2341 | GCGGCGATTAGTTCTCAGACG | 2342 | 2430 | 0 | 2430 |
| 881 | ETTVSHV | 2343 | GAGACTACGGTTTCTCATGTG | 2344 | 2428 | 1376 | 1052 |
| 882 | ALTNGQR | 2345 | GCACTAACCAACGGTCAACGT | 2346 | 2427 | 2000 | 427 |
| 883 | NNNGATS | 2347 | AATAATAATGGTGCGACTTCT | 2348 | 2426 | 526 | 1900 |
| 884 | IDGKSPP | 2349 | ATTGATGGGAAGTCGCCGCCG | 2350 | 2425 | 0 | 2425 |
| 885 | PTGTVVT | 2351 | CCGACTGGGACTGTTGTTACT | 2352 | 2425 | 425 | 2000 |
| 886 | SGEQLRI | 2353 | TCTGGGGAGCAGCTTAGGATT | 2354 | 2424 | 1343 | 1081 |
| 887 | AVNNVTL | 2355 | GCTGTGAATAATGTTACTCTT | 2356 | 2424 | 2000 | 424 |
| 888 | LSDLMRS | 2357 | CTTAGCGACCTCATGAGGTCT | 2358 | 2424 | 627 | 1797 |
| 889 | QYVVTGG | 2359 | CAGTATGTTGTTACTGGTGGG | 2360 | 2423 | 2000 | 423 |
| 890 | MDGKTPP | 2361 | ATGGACGGTAAAACTCCCCCT | 2362 | 2421 | 0 | 2421 |
| 891 | IGMDPKA | 2363 | ATTGGTATGGATCCGAAGGCG | 2364 | 2420 | 1509 | 910 |
| 892 | GVDAVAY | 2365 | GGAGTGGACGCTGTGGCATAC | 2366 | 2414 | 0 | 2414 |
| 893 | GNQGGTR | 2367 | GGTAATCAGGGGGGGACGCGT | 2368 | 2414 | 587 | 1827 |
| 894 | ASASSPR | 2369 | GCCTCAGCATCATCACCTAGG | 2370 | 2413 | 0 | 2413 |
| 895 | GLSPEAR | 2371 | GGTTTGTCTCCTGAGGCGCGT | 2372 | 2413 | 0 | 2413 |
| 896 | LVTTLHM | 2373 | TTGGTCACCACACTACACATG | 2374 | 2413 | 292 | 2121 |
| 897 | HAGLGII | 2375 | CACGCGGGGCTGGGCATAATC | 2376 | 2412 | 2000 | 412 |
| 898 | AILGASS | 2377 | GCCATACTAGGCGCATCTTCC | 2378 | 2412 | 2000 | 412 |
| 899 | STHDIRV | 2379 | TCTACTCACGACATACGAGTC | 2380 | 2411 | 411 | 2000 |
| 900 | AEQLSHS | 2381 | GCAGAACAACTATCCCACAGC | 2382 | 2411 | 2411 | 0 |
| 901 | LHDTLTR | 2383 | CTGCACGACACATTAACCCGC | 2384 | 2410 | 2000 | 410 |
| 902 | PGEHYPA | 2385 | CCCGGCGAACACTACCCAGCG | 2386 | 2410 | 1755 | 655 |
| 903 | SSGSGVA | 2387 | AGTTCTGGGTCGGGGGTGGCT | 2388 | 2410 | 2410 | 0 |
| 904 | MVDSAQL | 2389 | ATGGTGGATTCGGCGCAGCTT | 2390 | 2407 | 0 | 2407 |
| 905 | SGLVTEL | 2391 | AGCGGATTGGTAACTGAACTG | 2392 | 2406 | 0 | 2406 |
| 906 | HGHIAQS | 2393 | CATGGGCATATTGCGCAGTCG | 2394 | 2406 | 169 | 2237 |
| 907 | HTDGSYV | 2395 | CATACGGATGGGAGTTATGTT | 2396 | 2405 | 254 | 2151 |
| 908 | MAGQPSQ | 2397 | ATGGCGGGTCAGCCTAGTCAG | 2398 | 2404 | 404 | 2000 |
| 909 | PTQGTPR | 2399 | CCTACTCAGGGGACGCCTCGG | 2400 | 2402 | 703 | 1699 |
| 910 | AGAAIVA | 2401 | GCTGGTGCGGCGATTGTTGCG | 2402 | 2402 | 2393 | 9 |
| 911 | VSASTMA | 2403 | GTTAGTGCTTCGACTATGGCT | 2404 | 2401 | 0 | 2401 |
| 912 | SSDSRTL | 2405 | TCGTCGGATTCGCGGACGTTG | 2406 | 2400 | 0 | 2400 |
| 913 | LTDAHGI | 2407 | TTAACGGACGCTCACGGGATC | 2408 | 2398 | 0 | 2398 |
| 914 | TLQGGLS | 2409 | ACTCTGCAGGGTGGTCTGTCT | 2410 | 2398 | 0 | 2398 |
| 915 | SMSSEIW | 2411 | TCGATGTCATCCGAAATATGG | 2412 | 2398 | 226 | 2172 |
| 916 | QYVDTGG | 2413 | CAGTATGTTGATACTGGTGGG | 2414 | 2398 | 2313 | 85 |
| 917 | VSNTSES | 2415 | GTGTCAAACACCTCCGAATCG | 2416 | 2396 | 1370 | 1026 |
| 918 | IGSAGDR | 2417 | ATTGGGAGTGCGGGTGATCGT | 2418 | 2396 | 396 | 2000 |
| 919 | ANEDRMS | 2419 | GCTAATGAGGATCGGATGAGT | 2420 | 2395 | 2000 | 395 |
| 920 | AAESSVR | 2421 | GCGGCGGAGAGTTCTGTGCGG | 2422 | 2395 | 395 | 2000 |
| 921 | SQSDFPN | 2423 | TCACAAAGTGACTTCCCCAAC | 2424 | 2394 | 0 | 2394 |
| 922 | VRGEETV | 2425 | GTTCGTGGGGAAGAAACCGTC | 2426 | 2394 | 985 | 1410 |
| 923 | NNLGDRM | 2427 | AATAATCTTGGTGATCGTATG | 2428 | 2394 | 2000 | 394 |
| 924 | GNLDLKA | 2429 | GGAAACCTTGACCTCAAAGCC | 2430 | 2394 | 752 | 1642 |
| 925 | GTKDVSP | 2431 | GGCACAAAAGACGTGTCACCC | 2432 | 2393 | 2000 | 393 |
| 926 | AIPIAST | 2433 | GCTATTCCGATTGCGTCTACG | 2434 | 2392 | 0 | 2392 |
| 927 | VSASSVD | 2435 | GTATCAGCCTCGTCGGTGGAC | 2436 | 2392 | 2259 | 133 |
| 928 | NMDRDHV | 2437 | AATATGGATCGTGATCATGTG | 2438 | 2390 | 0 | 2390 |
| 929 | SHASDSK | 2439 | TCTCATGCTTCTGATTCGAAG | 2440 | 2390 | 261 | 2130 |
| 930 | PGSDGGH | 2441 | CCGGGGTCGGATGGGGGGCAT | 2442 | 2390 | 1357 | 1033 |
| 931 | NLGEVQM | 2443 | AATTTGGGTGAGGTTCAGATG | 2444 | 2390 | 2390 | 0 |
| 932 | RYFGDAS | 2445 | CGTTACTTCGGAGACGCGAGT | 2446 | 2389 | 2000 | 389 |
| 933 | AADTTVR | 2447 | GCCGCTGACACGACAGTACGC | 2448 | 2388 | 2111 | 276 |
| 934 | VTGVESR | 2449 | GTCACAGGAGTCGAATCTCGA | 2450 | 2387 | 2000 | 387 |
| 935 | ATVSSPR | 2451 | GCGACCGTATCAAGCCCTAGG | 2452 | 2387 | 2000 | 387 |
| 936 | GGNAGLN | 2453 | GGTGGTAATGCGGGGCTTAAT | 2454 | 2387 | 387 | 2000 |
| 937 | RNQSDQM | 2455 | CGGAACCAATCGGACCAAATG | 2456 | 2387 | 2025 | 362 |
| 938 | RHQGTES | 2457 | AGGCACCAAGGAACAGAATCG | 2458 | 2387 | 543 | 1844 |
| 939 | TTSIPTP | 2459 | ACGACGTCTATTCCGACGCCT | 2460 | 2386 | 0 | 2386 |
| 940 | TSHLGQS | 2461 | ACGTCACACCTTGGGCAAAGT | 2462 | 2386 | 2000 | 386 |
| 941 | GVNPAVS | 2463 | GGTGTTAATCCTGCGGTGTCT | 2464 | 2386 | 2000 | 386 |
| 942 | GSDTTVG | 2465 | GGTTCGGATACGACGGTTGGT | 2466 | 2385 | 102 | 2282 |
| 943 | DLAQSGR | 2467 | GATTTGGCTCAGAGTGGGCGT | 2468 | 2385 | 1796 | 589 |
| 944 | GMNEHVA | 2469 | GGGATGAACGAACACGTCGCC | 2470 | 2384 | 283 | 2100 |
| 945 | VMDHKST | 2471 | GTTATGGATCATAAGAGTACG | 2472 | 2384 | 2000 | 384 |
| 946 | MSTDTPA | 2473 | ATGTCGACAGACACGCCCGCG | 2474 | 2381 | 2381 | 0 |
| 947 | AMTVEMP | 2475 | GCTATGACGGTTGAGATGCCT | 2476 | 2380 | 0 | 2380 |
| 948 | GSRENER | 2477 | GGCAGCCGCGAAAACGAACGA | 2478 | 2379 | 1301 | 1078 |
| 949 | ATDSQGL | 2479 | GCTACGGATTCGCAGGGGCTG | 2480 | 2378 | 2378 | 0 |
| 950 | PNERITV | 2481 | CCGAATGAGAGGATTACTGTG | 2482 | 2377 | 2000 | 377 |
| 951 | TTLSDTA | 2483 | ACTACTCTGTCTGATACTGCG | 2484 | 2376 | 0 | 2376 |
| 952 | HSTGAEM | 2485 | CACTCAACAGGCGCCGAAATG | 2486 | 2376 | 0 | 2376 |
| 953 | AVLAAAH | 2487 | GCGGTGTTGGCTGCGGCTCAT | 2488 | 2376 | 2376 | 0 |
| 954 | STLHSST | 2489 | TCTACATTGCACTCGAGCACC | 2490 | 2375 | 2375 | 0 |
| 955 | VLSVGVV | 2491 | GTGCTGAGTGTGGGGGTTGTT | 2492 | 2375 | 2375 | 0 |
| 956 | KEGIATA | 2493 | AAAGAAGGTATCGCTACCGCA | 2494 | 2374 | 2000 | 374 |
| 957 | MVNHTNT | 2495 | ATGGTGAACCACACTAACACT | 2496 | 2374 | 374 | 2000 |
| 958 | ESTATLR | 2497 | GAGTCTACTGCTACTCTTCGG | 2498 | 2372 | 2003 | 369 |
| 959 | AVKEHES | 2499 | GCCGTCAAAGAACACGAATCC | 2500 | 2372 | 2000 | 372 |
| 960 | RYFGDAS | 2501 | CGGTATTTTGGGGATGCTTCG | 2502 | 2371 | 41 | 2330 |
| 961 | LDARGDR | 2503 | CTGGACGCCAGGGGAGACCGT | 2504 | 2371 | 1868 | 503 |
| 962 | PLNKDTR | 2505 | CCATTGAACAAAGACACTCGG | 2506 | 2370 | 648 | 1722 |
| 963 | FQVDKVM | 2507 | TTTCAGGTTGATAAGGTTATG | 2508 | 2369 | 369 | 2000 |
| 964 | LTDKITS | 2509 | CTGACAGACAAAATCACTAGT | 2510 | 2368 | 1629 | 739 |
| 965 | LKPAIEL | 2511 | CTTAAGCCTGCGATTGAGCTG | 2512 | 2368 | 519 | 1849 |
| 966 | ADSVYAK | 2513 | GCTGATAGTGTTTATGCTAAG | 2514 | 2368 | 2274 | 94 |
| 967 | VMSSPGP | 2515 | GTTATGTCTTCGCCTGGTCCT | 2516 | 2367 | 367 | 2000 |
| 968 | ALAISER | 2517 | GCCCTAGCTATCAGTGAACGT | 2518 | 2367 | 2367 | 0 |
| 969 | VTKEHLA | 2519 | GTTACTAAAGAACACCTCGCC | 2520 | 2366 | 1915 | 451 |
| 970 | GLTNTNI | 2521 | GGACTTACAAACACGAACATA | 2522 | 2366 | 2252 | 114 |
| 971 | KQVSMES | 2523 | AAGCAGGTGTCGATGGAGTCG | 2524 | 2365 | 2246 | 119 |
| 972 | SPSASPN | 2525 | AGTCCGTCGGCTTCTCCTAAT | 2526 | 2364 | 2000 | 364 |
| 973 | VVVGNVK | 2527 | GTCGTAGTGGGCAACGTTAAA | 2528 | 2364 | 2000 | 364 |
| 974 | SHGSDTK | 2529 | TCCCACGGAAGTGACACCAAA | 2530 | 2363 | 1823 | 540 |
| 975 | QSREIKI | 2531 | CAGAGTAGGGAGATTAAGATT | 2532 | 2362 | 2362 | 0 |
| 976 | PALQGNI | 2533 | CCGGCTCTTCAGGGTAATATT | 2534 | 2361 | 2361 | 0 |
| 977 | TLVGVER | 2535 | ACACTCGTGGGCGTCGAAAGG | 2536 | 2360 | 0 | 2360 |
| 978 | SGGTMTL | 2537 | AGTGGGGGTACGATGACGCTG | 2538 | 2360 | 0 | 2360 |
| 979 | DRRTDDS | 2539 | GATCGTCGTACTGATGATTCT | 2540 | 2359 | 0 | 2359 |
| 980 | NSDNTRL | 2541 | AATTCGGATAATACTAGGCTG | 2542 | 2357 | 462 | 1896 |
| 981 | ALQSAQV | 2543 | GCACTACAATCTGCACAAGTT | 2544 | 2356 | 2000 | 356 |
| 982 | NVNPDSL | 2545 | AACGTAAACCCCGACAGCTTA | 2546 | 2356 | 2211 | 145 |
| 983 | SNGLPAK | 2547 | AGTAATGGGCTTCCTGCGAAG | 2548 | 2356 | 2205 | 151 |
| 984 | GLNEHVV | 2549 | GGGCTAAACGAACACGTCGTA | 2550 | 2355 | 214 | 2141 |
| 985 | LVTVHTA | 2551 | CTAGTCACCGTACACACGGCA | 2552 | 2354 | 714 | 1640 |
| 986 | GVAATNS | 2553 | GGCGTAGCGGCAACCAACAGC | 2554 | 2354 | 0 | 2354 |
| 987 | QVTDNKT | 2555 | CAAGTAACAGACAACAAAACG | 2556 | 2354 | 199 | 2155 |
| 988 | VNGVSTI | 2557 | GTTAACGGAGTATCCACAATC | 2558 | 2354 | 2169 | 186 |
| 989 | PIASSYE | 2559 | CCTATTGCGTCTAGTTATGAG | 2560 | 2354 | 2354 | 0 |
| 990 | LGESLSR | 2561 | TTGGGTGAGTCTTTGAGTCGG | 2562 | 2354 | 2354 | 0 |
| 991 | PALAGNF | 2563 | CCGGCTCTTGCGGGTAATTTT | 2564 | 2353 | 0 | 2353 |
| 992 | RRDASDP | 2565 | CGGCGAGACGCCTCCGACCCC | 2566 | 2353 | 2353 | 0 |
| 993 | WDNFRFA | 2567 | TGGGACAACTTCAGATTCGCG | 2568 | 2352 | 0 | 2352 |
| 994 | VIGGVLS | 2569 | GTGATTGGTGGTGTGTTGAGT | 2570 | 2352 | 1019 | 1333 |
| 995 | ADDNNRW | 2571 | GCTGATGATAATAATAGGTGG | 2572 | 2352 | 2000 | 352 |
| 996 | LTHSTAV | 2573 | CTTACCCACAGTACAGCGGTG | 2574 | 2352 | 352 | 2000 |
| 997 | VLSGEVL | 2575 | GTCTTGTCTGGAGAAGTCCTT | 2576 | 2351 | 351 | 2000 |
| 998 | SVVADKH | 2577 | AGTGTTGTGGCGGACAAACAC | 2578 | 2350 | 0 | 2350 |
| 999 | PGSTDPK | 2579 | CCTGGGAGTACTGATCCGAAG | 2580 | 2350 | 2000 | 350 |
| 1000 | ASAELGR | 2581 | GCGAGTGCGGAGCTGGGTCGT | 2582 | 2349 | 2218 | 131 |

Mouse_DG

| | | SEQ | | SEQ | | | |
|---|---|---|---|---|---|---|---|
| | | ID | | ID | Combined | BALB/cJ | C57BL/6J |
| Rank | Peptide | NO: | Sequence | NO: | score | score | score |
| 1 | REQQKLW | 2583 | CGTGAGCAGCAGAAGCTTTGG | 2584 | 39151 | 21151 | 18000 |
| 2 | REQQKLW | 2585 | CGGGAACAACAAAAATTATGG | 2586 | 38000 | 22000 | 16000 |
| 3 | ASNPGRW | 2587 | GCTTCGAATCCGGGTCGGTGG | 2588 | 24583 | 4583 | 20000 |
| 4 | SLDKPFK | 2589 | AGTTTGGATAAGCCTTTTAAG | 2590 | 24000 | 0 | 24000 |
| 5 | TLAVPFK | 2591 | ACTTTGGCGGTGCCTTTTAAG | 2592 | 22000 | 0 | 22000 |
| 6 | TLAVPFK | 2593 | ACCTTAGCTGTCCCGTTCAAA | 2594 | 22000 | 0 | 22000 |
| 7 | SLDKPFK | 2595 | TCACTGGACAAACCATTCAAA | 2596 | 21590 | 0 | 21590 |
| 8 | WTLESGH | 2597 | TGGACTCTGGAGTCTGGTCAT | 2598 | 20534 | 4228 | 16306 |
| 9 | ASNPGRW | 2599 | GCAAGCAACCCTGGAAGATGG | 2600 | 18000 | 0 | 18000 |
| 10 | REQKKLW | 2601 | CGTGAGCAGAAGAAGCTTTGG | 2602 | 17695 | 10175 | 7520 |
| 11 | WTLESGH | 2603 | TGGACGCTCGAATCGGGCCAC | 2604 | 17407 | 4000 | 13407 |
| 12 | REQKKLW | 2605 | CGGGAACAAAAAAAACTGTGG | 2606 | 16457 | 7319 | 9138 |
| 13 | ERLLVQL | 2607 | GAGCGGCTGCTTGTTCAGCTG | 2608 | 15513 | 2000 | 13513 |
| 14 | RMQRTLY | 2609 | CGTATGCAGCGGACTCTGTAT | 2610 | 12453 | 2000 | 10453 |
| 15 | ERLLVQL | 2611 | GAACGACTTCTAGTCCAACTA | 2612 | 11949 | 0 | 11949 |
| 16 | LGFSPPR | 2613 | CTTGGATTCTCACCTCCCCGT | 2614 | 11710 | 0 | 11710 |
| 17 | WAISDGY | 2615 | TGGGCGATTAGTGATGGGTAT | 2616 | 10828 | 6571 | 4258 |
| 18 | TEKLPFR | 2617 | ACTGAGAAGCTGCCTTTTCGG | 2618 | 10129 | 0 | 10129 |
| 19 | VRGSSIL | 2619 | GTGCGTGGGTCGTCGATTCTT | 2620 | 9714 | 7617 | 2097 |
| 20 | KLADSVP | 2621 | AAACTTGCAGACTCAGTGCCC | 2622 | 9356 | 7144 | 2212 |
| 21 | VRGSSIL | 2623 | GTCCGGGGATCCAGTATCCTG | 2624 | 8449 | 5059 | 3390 |
| 22 | RQQQKLW | 2625 | AGGCAACAACAAAAATTATGG | 2626 | 8393 | 2000 | 6393 |
| 23 | TVNNDRF | 2627 | ACCGTTAACAACGACCGATTC | 2628 | 8028 | 5611 | 2417 |
| 24 | TVSENAV | 2629 | ACGGTTAGTGAGAATGCGGTT | 2630 | 8000 | 8000 | 0 |
| 25 | MSANERT | 2631 | ATGTCGGCGAATGAGCGTACG | 2632 | 8000 | 6000 | 2000 |
| 26 | RDQQKLW | 2633 | CGTGATCAGCAGAAGCTTTGG | 2634 | 7761 | 4813 | 2948 |
| 27 | GASNGGT | 2635 | GGGGCGAGTAATGGTGGGACT | 2636 | 7674 | 5252 | 2422 |
| 28 | TEKLPFR | 2637 | ACAGAAAAACTCCCCTTCAGA | 2638 | 7548 | 0 | 7548 |
| 29 | ASTATLW | 2639 | GCCTCAACGGCCACCTTATGG | 2640 | 6807 | 0 | 6807 |
| 30 | VTELTKF | 2641 | GTGACTGAGCTTACGAAGTTT | 2642 | 6655 | 4000 | 2655 |
| 31 | KEISVSV | 2643 | AAGGAGATTAGTGTGTCGGTT | 2644 | 6420 | 6007 | 413 |
| 32 | QVAQQGA | 2645 | CAGGTTGCGCAGCAGGGGGCG | 2646 | 6393 | 2000 | 4393 |
| 33 | GVAGTNT | 2647 | GGGGTGGCTGGGACGAATACT | 2648 | 6386 | 6011 | 375 |
| 34 | ASAQGAL | 2649 | GCGTCTGCTCAGGGTGCGCTT | 2650 | 6382 | 1444 | 4938 |
| 35 | QSVDRSK | 2651 | CAGTCGGTGGATCGTAGTAAG | 2652 | 6293 | 5197 | 1096 |
| 36 | RYVGESS | 2653 | CGGTACGTCGGAGAAAGCAGT | 2654 | 6252 | 1422 | 4830 |
| 37 | LGHNAGV | 2655 | TTGGGGCATAATGCTGGTGTT | 2656 | 6239 | 2003 | 4237 |
| 38 | RAAGTSA | 2657 | CGCGCCGCTGGCACCTCAGCA | 2658 | 6000 | 6000 | 0 |
| 39 | VGISSGV | 2659 | GTTGGTATTTCTTCGGGTGTG | 2660 | 6000 | 4000 | 2000 |
| 40 | VLVSPGP | 2661 | GTTCTGGTTTCGCCTGGTCCT | 2662 | 6000 | 4000 | 2000 |
| 41 | SGETLRI | 2663 | TCTGGGGAGACGCTTAGGATT | 2664 | 5977 | 4000 | 1977 |
| 42 | STEGAAL | 2665 | AGTACGGAGGGGGCGGCTCTG | 2666 | 5954 | 5715 | 239 |
| 43 | SSSGAAR | 2667 | TCTTCTTCAGGTGCCGCCCGC | 2668 | 5926 | 5926 | 0 |
| 44 | VLASNGP | 2669 | GTGTTAGCGTCCAACGGGCCG | 2670 | 5898 | 3269 | 2628 |
| 45 | VVQVTGR | 2671 | GTTGTTCAGGTTACTGGGCGT | 2672 | 5875 | 5410 | 465 |
| 46 | FAVRLSS | 2673 | TTTGCTGTGCGGTTGTCGTCG | 2674 | 5855 | 2809 | 3046 |
| 47 | LVRDTKT | 2675 | CTCGTAAGAGACACAAAAACG | 2676 | 5811 | 5452 | 359 |
| 48 | SGESLSR | 2677 | TCTGGCGAAAGCTTATCTAGG | 2678 | 5804 | 3804 | 2000 |
| 49 | TLANSQR | 2679 | ACTTTGGCGAATTCTCAGCGG | 2680 | 5746 | 4000 | 1746 |
| 50 | SQEQRAR | 2681 | AGTCAGGAGCAGAGGGCTCGT | 2682 | 5679 | 4000 | 1679 |
| 51 | SREGGNV | 2683 | AGCCGAGAAGGAGGGAACGTA | 2684 | 5580 | 3580 | 2000 |
| 52 | LGGSSMG | 2685 | CTTGGTGGGTCTTCAATGGGG | 2686 | 5565 | 2612 | 2953 |
| 53 | SGSTDKL | 2687 | TCTGGTTCGACTGATAAGTTG | 2688 | 5556 | 3264 | 2292 |
| 54 | RDQQKLW | 2689 | CGGGACCAACAAAAACTGTGG | 2690 | 5404 | 4000 | 1404 |
| 55 | RVSEVGS | 2691 | CGCGTCTCAGAAGTTGGCAGC | 2692 | 5379 | 5379 | 0 |
| 56 | LGFSPPR | 2693 | CTGGGTTTTAGTCCGCCGAGG | 2694 | 5369 | 0 | 5369 |
| 57 | SPADTRR | 2695 | TCTCCTGCGGATACTAGGAGG | 2696 | 5338 | 5338 | 0 |
| 58 | LSRGDEM | 2697 | TTGAGTCGCGGAGACGAAATG | 2698 | 5326 | 0 | 5326 |
| 59 | RMQRTLY | 2699 | CGAATGCAACGAACATTGTAC | 2700 | 5315 | 2000 | 3315 |
| 60 | IANLAAS | 2701 | ATTGCGAATCTTGCTGCTTCG | 2702 | 5311 | 5107 | 204 |
| 61 | AGGVRDR | 2703 | GCGGGTGGTGTTCGTGATCGT | 2704 | 5299 | 4717 | 582 |
| 62 | GSGSGGL | 2705 | GGGAGTGGATCCGGAGGCTTA | 2706 | 5252 | 5073 | 179 |
| 63 | TLANSER | 2707 | ACACTCGCCAACTCAGAAAGG | 2708 | 5237 | 2000 | 3237 |
| 64 | VNYSVAL | 2709 | GTTAATTATTCGGTGGCGCTT | 2710 | 5206 | 3287 | 1920 |
| 65 | KNPGVYT | 2711 | AAGAATCCGGGGGTGTATACT | 2712 | 5173 | 1750 | 3423 |
| 66 | QREAARI | 2713 | CAGCGTGAGGCGGCGCGGATT | 2714 | 5173 | 1534 | 3639 |
| 67 | LSQGSQQ | 2715 | CTATCCCAAGGTAGTCAACAA | 2716 | 5167 | 5167 | 0 |
| 68 | NGSEGDR | 2717 | AACGGTTCGGAAGGGGACAGG | 2718 | 5157 | 3157 | 2000 |
| 69 | NVGVVQL | 2719 | AACGTAGGCGTAGTACAACTA | 2720 | 5144 | 4780 | 364 |
| 70 | TLAVPF* | 2721 | ACTTTGGCGGTGCCTTTTTAA | 2722 | 5135 | 0 | 5135 |
| 71 | HSLQTSA | 2723 | CACTCATTACAAACCTCTGCG | 2724 | 5096 | 2682 | 2414 |
| 72 | SATDVKH | 2725 | TCGGCAACAGACGTAAAACAC | 2726 | 5083 | 5083 | 0 |
| 73 | SGANLSY | 2727 | TCTGGTGCGAATTTGTCTTAT | 2728 | 4985 | 4271 | 714 |
| 74 | KAHDGEV | 2729 | AAAGCGCACGACGGCGAAGTT | 2730 | 4978 | 2000 | 2978 |
| 75 | KASDTPM | 2731 | AAGGCTTCTGATACTCCTATG | 2732 | 4840 | 2000 | 2840 |
| 76 | PGEHNKA | 2733 | CCGGGTGAGCATAATAAGGCT | 2734 | 4838 | 4743 | 95 |
| 77 | NSAADRQ | 2735 | AATAGTGCGGCTGATCGTCAG | 2736 | 4808 | 2000 | 2808 |
| 78 | FTHGTGT | 2737 | TTCACGCACGGCACAGGCACA | 2738 | 4789 | 4000 | 789 |
| 79 | LSNHGPI | 2739 | CTCTCCAACCACGGCCCGATC | 2740 | 4759 | 3814 | 945 |
| 80 | GGASPVR | 2741 | GGGGGTGCTTCTCCTGTGCGG | 2742 | 4756 | 4756 | 0 |
| 81 | KLTNIGT | 2743 | AAACTTACCAACATAGGCACG | 2744 | 4723 | 2000 | 2723 |
| 82 | PGSDGRT | 2745 | CCAGGAAGTGACGGAAGGACG | 2746 | 4719 | 4000 | 719 |
| 83 | AGGGATR | 2747 | GCCGGTGGAGGCGCCACTCGC | 2748 | 4718 | 0 | 4718 |
| 84 | GTGSTIV | 2749 | GGTACAGGCTCCACAATCGTA | 2750 | 4716 | 2942 | 1774 |
| 85 | SNGAGYL | 2751 | TCCAACGGAGCTGGGTACTTA | 2752 | 4714 | 2000 | 2714 |
| 86 | GGTSSGH | 2753 | GGAGGAACTTCCAGCGGGCAC | 2754 | 4703 | 4000 | 703 |
| 87 | AVLSQNI | 2755 | GCTGTGTTGTCTCAGAATATT | 2756 | 4696 | 3737 | 959 |
| 88 | REEQKVW | 2757 | CGTGAGGAGCAGAAGGTTTGG | 2758 | 4694 | 4000 | 694 |
| 89 | PTQGTNR | 2759 | CCCACACAAGGAACCAACCGC | 2760 | 4690 | 4000 | 690 |
| 90 | VTTVSNV | 2761 | GTTACGACCGTGAGCAACGTT | 2762 | 4685 | 2000 | 2685 |
| 91 | GNVNGGA | 2763 | GGTAACGTGAACGGAGGAGCG | 2764 | 4685 | 0 | 4685 |
| 92 | SVDSGRL | 2765 | TCGGTCGACTCTGGACGTTTG | 2766 | 4679 | 4000 | 679 |
| 93 | LSNHVPV | 2767 | TTATCCAACCACGTTCCGGTG | 2768 | 4648 | 2000 | 2648 |
| 94 | ASTATLW | 2769 | GCGTCTACTGCTACTCTTTGG | 2770 | 4647 | 1574 | 3073 |
| 95 | SDKPVNT | 2771 | TCCGACAAACCAGTCAACACA | 2772 | 4643 | 3103 | 1540 |
| 96 | NVQTVST | 2773 | AACGTTCAAACCGTCTCAACT | 2774 | 4642 | 4000 | 642 |
| 97 | RTSTDVV | 2775 | AGAACTTCCACAGACGTGGTA | 2776 | 4611 | 4000 | 611 |
| 98 | KASDTPK | 2777 | AAAGCGTCCGACACACCGAAA | 2778 | 4602 | 4474 | 127 |
| 99 | VQGPQNG | 2779 | GTGCAGGGTCCGCAGAATGGT | 2780 | 4600 | 2000 | 2600 |
| 100 | GGTNSGH | 2781 | GGCGGAACCAACAGCGGCCAC | 2782 | 4599 | 4000 | 599 |
| 101 | GNSGGRF | 2783 | GGGAATAGTGGGGGTCGTTTT | 2784 | 4598 | 2000 | 2598 |
| 102 | LAGLGGG | 2785 | CTAGCTGGGCTGGGTGGCGGG | 2786 | 4578 | 2000 | 2578 |
| 103 | QLRDTKT | 2787 | CAGCTGCGTGATACTAAGACT | 2788 | 4577 | 3332 | 1245 |
| 104 | MGVAGVH | 2789 | ATGGGTGTTGCTGGAGTTCAC | 2790 | 4572 | 2000 | 2572 |
| 105 | AVPGTYS | 2791 | GCGGTGCCTGGGACGTATTCT | 2792 | 4567 | 4000 | 567 |
| 106 | MAAKSTP | 2793 | ATGGCTGCGAAGTCGACGCCG | 2794 | 4558 | 3666 | 892 |
| 107 | QVRDTNT | 2795 | CAGGTGCGTGATACTAATACT | 2796 | 4555 | 3848 | 707 |
| 108 | LHNLTQD | 2797 | CTTCATAATCTTACGCAGGAT | 2798 | 4537 | 2611 | 1926 |
| 109 | PGNSASI | 2799 | CCAGGAAACTCCGCATCGATA | 2800 | 4515 | 4133 | 382 |
| 110 | MGGGTNH | 2801 | ATGGGAGGTGGGACCAACCAC | 2802 | 4508 | 4508 | 0 |
| 111 | TLANSQR | 2803 | ACACTAGCCAACAGTCAACGT | 2804 | 4497 | 2000 | 2497 |
| 112 | SAETLRL | 2805 | TCTGCGGAGACGCTTAGGCTT | 2806 | 4491 | 4000 | 491 |
| 113 | MGGGANP | 2807 | ATGGGGGGGGGTGCTAATCCG | 2808 | 4488 | 4000 | 488 |
| 114 | GLAETRA | 2809 | GGGCTTGCTGAGACTAGGGCT | 2810 | 4468 | 2000 | 2468 |
| 115 | AMSSTVG | 2811 | GCAATGAGTTCCACCGTTGGC | 2812 | 4461 | 4000 | 461 |
| 116 | TGPQVSI | 2813 | ACTGGGCCGCAGGTTAGTATT | 2814 | 4457 | 2000 | 2457 |
| 117 | SVDNGKR | 2815 | TCGGTGGATAATGGGAAGCGG | 2816 | 4453 | 2875 | 1578 |
| 118 | NVSRDHS | 2817 | AACGTCTCCCGTGACCACAGT | 2818 | 4446 | 4000 | 446 |
| 119 | KSNSENS | 2819 | AAGTCGAATTCGGAGAATAGT | 2820 | 4431 | 2000 | 2431 |
| 120 | VSLNEGH | 2821 | GTGTCGCTTAATGAGGGGCAT | 2822 | 4422 | 2000 | 2422 |
| 121 | VTADRTT | 2823 | GTGACTGCTGATCGGACTACG | 2824 | 4397 | 3818 | 579 |
| 122 | VLGGTAG | 2825 | GTGCTGGGTGGTACTGCGGGG | 2826 | 4385 | 2000 | 2385 |
| 123 | TAVNSTS | 2827 | ACGGCTGTGAATTCGACTTCG | 2828 | 4385 | 1947 | 2438 |
| 124 | LSLTDVV | 2829 | CTGAGTTTGACTGATGTGGTT | 2830 | 4384 | 3943 | 441 |
| 125 | PIHGASS | 2831 | CCGATTCATGGTGCTAGTTCG | 2832 | 4378 | 4000 | 378 |
| 126 | GINAVGP | 2833 | GGGATTAATGCTGTTGGTCCG | 2834 | 4370 | 2000 | 2370 |
| 127 | GSGTGVA | 2835 | GGTTCTGGGACGGGGGTGGCT | 2836 | 4367 | 0 | 4367 |
| 128 | RQQQKLW | 2837 | CGTCAGCAGCAGAAGCTTTGG | 2838 | 4358 | 1959 | 2399 |
| 129 | TGQTEMT | 2839 | ACGGGGCAGACTGAGATGACT | 2840 | 4341 | 2000 | 2341 |
| 130 | VGNSSGV | 2841 | GTGGGCAACTCCTCTGGGGTT | 2842 | 4334 | 2000 | 2334 |
| 131 | FNSGTGT | 2843 | TTCAACAGCGGGACTGGCACA | 2844 | 4333 | 4000 | 333 |
| 132 | KLAEGIR | 2845 | AAGCTTGCTGAGGGGATTAGG | 2846 | 4328 | 0 | 4328 |
| 133 | GNQGGTR | 2847 | GGTAATCAGGGGGGGACGCGT | 2848 | 4320 | 4000 | 320 |
| 134 | GSESGVA | 2849 | GGTTCTGAGTCGGGGGTGGCT | 2850 | 4316 | 4000 | 316 |
| 135 | TSSRPEE | 2851 | ACTTCTTCTCGGCCGGAGGAG | 2852 | 4312 | 4312 | 0 |
| 136 | RSVGTSA | 2853 | CGTTCGGTGGGTACTTCGGCG | 2854 | 4312 | 4000 | 312 |
| 137 | AVVLNAL | 2855 | GCGGTGGTGCTGAATGCTTTG | 2856 | 4302 | 4000 | 302 |
| 138 | RTSTDVV | 2857 | AGGACGAGTACGGATGTTGTG | 2858 | 4300 | 4300 | 0 |
| 139 | LRNTQLD | 2859 | TTGCGGAATACTCAGTTGGAT | 2860 | 4284 | 2000 | 2284 |
| 140 | IPPGVPR | 2861 | ATTCCGCCTGGGGTTCCGCGT | 2862 | 4280 | 3607 | 673 |
| 141 | MNGGHIL | 2863 | ATGAATGGGGGTCATATTCTG | 2864 | 4268 | 1339 | 2930 |
| 142 | RYVGESS | 2865 | AGGTATGTGGGGGAGTCTTCG | 2866 | 4251 | 2642 | 1610 |
| 143 | PNGVSVV | 2867 | CCTAATGGTGTTTCTGTGGTG | 2868 | 4247 | 3597 | 650 |
| 144 | ASLGAYS | 2869 | GCGTCGCTTGGGGCGTATTCG | 2870 | 4244 | 3212 | 1032 |
| 145 | GSGSVVA | 2871 | GGTTCTGGGTCGGTGGTGGCT | 2872 | 4238 | 959 | 3279 |
| 146 | MGSNGQV | 2873 | ATGGGGTCTAATGGGCAGGTT | 2874 | 4236 | 2000 | 2236 |
| 147 | TGVLINS | 2875 | ACGGGTGTTTTGATTAATTCG | 2876 | 4228 | 1472 | 2756 |
| 148 | LSLTGGV | 2877 | TTGTCGCTCACCGGGGGAGTC | 2878 | 4208 | 1210 | 2998 |
| 149 | SPEGRNV | 2879 | TCGCCCGAAGGCCGCAACGTA | 2880 | 4195 | 4000 | 195 |
| 150 | TIPNLSR | 2881 | ACAATACCGAACTTATCGCGC | 2882 | 4184 | 2911 | 1273 |
| 151 | KNGGHVQ | 2883 | AAAAACGGTGGGCACGTACAA | 2884 | 4180 | 4000 | 180 |
| 152 | ADLAGSR | 2885 | GCGGATCTGGCGGGGTCTAGG | 2886 | 4173 | 4000 | 173 |
| 153 | SYGSDSK | 2887 | TCTTATGGTTCTGATTCGAAG | 2888 | 4164 | 2830 | 1334 |
| 154 | SLGADVG | 2889 | AGTTTGGGGGCGGATGTTGGG | 2890 | 4164 | 2000 | 2164 |
| 155 | TVLTGSF | 2891 | ACCGTCCTCACCGGAAGCTTC | 2892 | 4136 | 4000 | 136 |
| 156 | GNSGGRF | 2893 | GGCAACTCAGGCGGCAGGTTC | 2894 | 4116 | 2000 | 2116 |
| 157 | DRGGSTV | 2895 | GACCGTGGGGGGTCCACCGTA | 2896 | 4104 | 1882 | 2222 |
| 158 | AGYSGTT | 2897 | GCAGGTTACTCCGGTACGACG | 2898 | 4104 | 1803 | 2301 |
| 159 | KGSDSPM | 2899 | AAGGGTTCTGATTCTCCTATG | 2900 | 4085 | 0 | 4085 |
| 160 | DSHVSGY | 2901 | GACTCGCACGTATCAGGCTAC | 2902 | 4079 | 0 | 4079 |
| 161 | KSHSEYS | 2903 | AAGTCGCATTCGGAGTATAGT | 2904 | 4071 | 2000 | 2071 |
| 162 | PTQGTHP | 2905 | CCTACTCAGGGGACGCATCCG | 2906 | 4070 | 2874 | 1196 |
| 163 | LEQSVAR | 2907 | CTCGAACAATCTGTCGCACGC | 2908 | 4058 | 4058 | 0 |
| 164 | KEIRASV | 2909 | AAGGAGATTCGTGCGTCGGTT | 2910 | 4056 | 3266 | 790 |
| 165 | NAINRMV | 2911 | AATGCGATTAATCGTATGGTG | 2912 | 4030 | 1095 | 2935 |
| 166 | KIGENAS | 2913 | AAAATCGGCGAAAACGCGAGT | 2914 | 4011 | 2000 | 2011 |
| 167 | KMGGGVS | 2915 | AAGATGGGTGGTGGGGTGTCG | 2916 | 4007 | 4007 | 0 |
| 168 | EVGNVSR | 2917 | GAGGTGGGGAATGTGTCTCGT | 2918 | 4002 | 3303 | 699 |
| 169 | RVTTHTQ | 2919 | CGTGTTACTACTCATACGCAG | 2920 | 4000 | 4000 | 0 |
| 170 | AGFSNQT | 2921 | GCCGGATTCTCGAACCAAACT | 2922 | 4000 | 4000 | 0 |
| 171 | QREAARI | 2923 | CAAAGGGAAGCTGCACGCATC | 2924 | 4000 | 4000 | 0 |
| 172 | LSLNTKT | 2925 | CTATCCCTAAACACCAAAACC | 2926 | 4000 | 4000 | 0 |
| 173 | RGGVSSV | 2927 | CGTGGTGGAGTTTCTAGTGTT | 2928 | 4000 | 4000 | 0 |
| 174 | ENRVNNA | 2929 | GAAAACAGAGTGAACAACGCA | 2930 | 4000 | 4000 | 0 |
| 175 | SNGGRVE | 2931 | AGTAACGGCGGACGCGTTGAA | 2932 | 4000 | 4000 | 0 |
| 176 | GVKNTNI | 2933 | GGCGTCAAAAACACGAACATC | 2934 | 4000 | 4000 | 0 |
| 177 | SDRTHAS | 2935 | TCGGATCGGACTCATGCGTCG | 2936 | 4000 | 4000 | 0 |
| 178 | GSGSGVL | 2937 | GGTTCTGGGTCGGGGGTGCTG | 2938 | 4000 | 4000 | 0 |
| 179 | AEGTDGV | 2939 | GCCGAAGGGACGGACGGCGTC | 2940 | 4000 | 4000 | 0 |
| 180 | GGKGEGP | 2941 | GGTGGGAAGGGTGAGGGTCCG | 2942 | 4000 | 4000 | 0 |
| 181 | TAVKVSG | 2943 | ACGGCTGTGAAGGTTAGTGGT | 2944 | 4000 | 4000 | 0 |
| 182 | TTGEGIR | 2945 | ACTACGGGTGAGGGTATTCGT | 2946 | 4000 | 4000 | 0 |
| 183 | LLASGAK | 2947 | CTGCTTGCGAGTGGGGCTAAG | 2948 | 4000 | 4000 | 0 |
| 184 | SLGTMTL | 2949 | TCTCTTGGAACCATGACCCTC | 2950 | 4000 | 4000 | 0 |
| 185 | RSEGTSA | 2951 | CGTTCGGAGGGTACTTCGGCG | 2952 | 4000 | 4000 | 0 |
| 186 | TNGQASR | 2953 | ACTAATGGTCAGGCGTCTAGG | 2954 | 4000 | 4000 | 0 |
| 187 | LGHKAGG | 2955 | TTGGGGCATAAGGCTGGTGGT | 2956 | 4000 | 4000 | 0 |
| 188 | VVAGTYS | 2957 | GTGGTGGCTGGGACGTATTCT | 2958 | 4000 | 4000 | 0 |
| 189 | SGEQIRL | 2959 | TCTGGGGAGCAGATTAGGCTT | 2960 | 4000 | 4000 | 0 |
| 190 | RGGVTGE | 2961 | CGGGGGGGTGTTACTGGTGAG | 2962 | 4000 | 4000 | 0 |
| 191 | VSSEAPL | 2963 | GTGTCTTCGGAGGCGCCGCTG | 2964 | 4000 | 4000 | 0 |
| 192 | RGPDHKT | 2965 | AGAGGCCCCGACCACAAAACT | 2966 | 4000 | 4000 | 0 |
| 193 | QAHGGPR | 2967 | CAGGCGCATGGGGGGCCTCGT | 2968 | 4000 | 4000 | 0 |
| 194 | LLTDKRV | 2969 | CTTCTTACTGATAAGCGTGTG | 2970 | 4000 | 4000 | 0 |
| 195 | TSPGAGL | 2971 | ACTTCTCCGGGTGCGGGGCTG | 2972 | 4000 | 2000 | 2000 |
| 196 | LTDSRPV | 2973 | TTGACGGATAGTAGGCCTGTT | 2974 | 4000 | 2000 | 2000 |
| 197 | RSEVNGV | 2975 | CGTTCCGAAGTAAACGGTGTG | 2976 | 4000 | 2000 | 2000 |
| 198 | SPGLSIS | 2977 | AGTCCTGGGCTGTCTATTAGT | 2978 | 4000 | 2000 | 2000 |
| 199 | SGSLVGA | 2979 | TCAGGGAGCCTAGTTGGTGCC | 2980 | 4000 | 2000 | 2000 |
| 200 | MVDKPSE | 2981 | ATGGTTGATAAGCCTTCTGAG | 2982 | 4000 | 2000 | 2000 |
| 201 | TPSAFPN | 2983 | ACTCCGTCGGCTTTTCCTAAT | 2984 | 4000 | 2000 | 2000 |
| 202 | MSLNDGV | 2985 | ATGAGTTTGAATGATGGGGTT | 2986 | 4000 | 2000 | 2000 |
| 203 | TTEAIVR | 2987 | ACTACTGAAGCGATCGTCCGC | 2988 | 4000 | 2000 | 2000 |
| 204 | SLVNASF | 2989 | AGTCTGGTTAATGCTTCGTTT | 2990 | 4000 | 2000 | 2000 |
| 205 | LSNHRPV | 2991 | CTAAGCAACCACCGACCAGTG | 2992 | 4000 | 2000 | 2000 |
| 206 | GSGSGVL | 2993 | GGCTCGGGATCAGGTGTACTC | 2994 | 4000 | 2000 | 2000 |
| 207 | AMSSTVG | 2995 | GCGATGTCGAGTACTGTGGGT | 2996 | 4000 | 2000 | 2000 |
| 208 | GMVTNHV | 2997 | GGCATGGTTACTAACCACGTT | 2998 | 4000 | 2000 | 2000 |
| 209 | KMGGGVS | 2999 | AAAATGGGCGGGGGTGTTAGC | 3000 | 4000 | 2000 | 2000 |
| 210 | KSDRGVV | 3001 | AAGTCGGATCGTGGGGTTGTT | 3002 | 4000 | 2000 | 2000 |
| 211 | QLRDTKT | 3003 | CAACTTCGCGACACGAAAACG | 3004 | 4000 | 2000 | 2000 |
| 212 | VANGFPR | 3005 | GTCGCTAACGGCTTCCCCAGA | 3006 | 4000 | 2000 | 2000 |
| 213 | YVNGATE | 3007 | TATGTGAATGGGGCGACTGAG | 3008 | 4000 | 0 | 4000 |
| 214 | QVTDNKT | 3009 | CAAGTCACCGACAACAAAACG | 3010 | 4000 | 0 | 4000 |
| 215 | PGHGPER | 3011 | CCTGGTCATGGTCCGGAGAGG | 3012 | 4000 | 0 | 4000 |
| 216 | MLGQAGG | 3013 | ATGCTGGGTCAGGCTGGGGGG | 3014 | 4000 | 0 | 4000 |
| 217 | APDSTVR | 3015 | GCGCCGGATAGTACTGTGCGG | 3016 | 4000 | 0 | 4000 |
| 218 | SHSSDSK | 3017 | TCTCATAGTTCTGATTCGAAG | 3018 | 4000 | 0 | 4000 |
| 219 | GLHGQSA | 3019 | GGCCTCCACGGACAATCCGCC | 3020 | 4000 | 0 | 4000 |
| 220 | NLGVGQM | 3021 | AACTTAGGAGTAGGCCAAATG | 3022 | 4000 | 0 | 4000 |
| 221 | FISSTMR | 3023 | TTTATTTCTAGTACGATGCGT | 3024 | 4000 | 0 | 4000 |
| 222 | DGTQSGR | 3025 | GACGGCACACAATCCGGCAGG | 3026 | 4000 | 0 | 4000 |
| 223 | MAGKSSP | 3027 | ATGGCGGGAAAAAGTTCTCCA | 3028 | 3990 | 2000 | 1990 |
| 224 | LSTGAQM | 3029 | CTTTCGACGGGTGCGCAGATG | 3030 | 3989 | 1979 | 2010 |
| 225 | NGGSEKR | 3031 | AATGGTGGTTCTGAGAAGCGT | 3032 | 3981 | 3293 | 688 |
| 226 | EDRSTTP | 3033 | GAGGATCGGTCGACTACTCCT | 3034 | 3974 | 3974 | 0 |
| 227 | GSVSSTK | 3035 | GGCTCGGTATCCTCAACAAAA | 3036 | 3974 | 3974 | 0 |
| 228 | KNPGVDP | 3037 | AAGAATCCGGGGGTGGATCCT | 3038 | 3961 | 3476 | 485 |
| 229 | SPSALPN | 3039 | TCACCCTCAGCCCTCCCGAAC | 3040 | 3959 | 2000 | 1959 |
| 230 | LPSLTGG | 3041 | CTTCCGAGTTTGACTGGGGGT | 3042 | 3958 | 943 | 3015 |
| 231 | TDRSDKG | 3043 | ACTGATAGGTCTGATAAGGGG | 3044 | 3956 | 1844 | 2112 |
| 232 | AQQGSTL | 3045 | GCTCAGCAGGGGTCTACGCTG | 3046 | 3953 | 1953 | 2000 |
| 233 | VLESNPR | 3047 | GTGCTTGAGTCGAATCCGCGG | 3048 | 3952 | 3385 | 567 |
| 234 | RIVGSDP | 3049 | AGGATTGTGGGTAGTGATCCG | 3050 | 3952 | 0 | 3952 |
| 235 | LSMTHGV | 3051 | CTGAGTATGACTCATGGGGTT | 3052 | 3948 | 6 | 3942 |
| 236 | KLAERIR | 3053 | AAACTCGCGGAACGTATCCGG | 3054 | 3943 | 3711 | 232 |
| 237 | VSAGLGI | 3055 | GTCTCGGCAGGTTTAGGAATC | 3056 | 3938 | 3938 | 0 |
| 238 | NSKDVLR | 3057 | AACTCGAAAGACGTCCTCCGA | 3058 | 3937 | 3729 | 208 |
| 239 | SMQSPST | 3059 | TCTATGCAGTCGCCTAGTACG | 3060 | 3935 | 3478 | 457 |
| 240 | TLNSATT | 3061 | ACGCTTAATTCGGCGACTACT | 3062 | 3927 | 2000 | 1927 |
| 241 | SGESLRL | 3063 | TCTGGGGAGTCGCTTAGGCTT | 3064 | 3924 | 3924 | 0 |
| 242 | QVRDIKT | 3065 | CAGGTGCGTGATATTAAGACT | 3066 | 3919 | 2000 | 1919 |
| 243 | QGGNAMR | 3067 | CAGGGTGGGAATGCTATGCGT | 3068 | 3914 | 1914 | 2000 |
| 244 | MLGGGES | 3069 | ATGTTGGGTGGTGGGGAGTCG | 3070 | 3912 | 2000 | 1912 |
| 245 | PTQGTLR | 3071 | CCGACACAAGGTACACTACGC | 3072 | 3912 | 2000 | 1912 |
| 246 | VIAGLAI | 3073 | GTAATCGCCGGACTCGCCATC | 3074 | 3911 | 3697 | 214 |
| 247 | KEISVSV | 3075 | AAAGAAATCTCTGTATCTGTG | 3076 | 3905 | 3522 | 383 |
| 248 | LSANVRT | 3077 | CTGTCGGCGAATGTTCGGACT | 3078 | 3904 | 1861 | 2044 |
| 249 | KGSDNPM | 3079 | AAGGGTTCTGATAATCCTATG | 3080 | 3902 | 3427 | 475 |
| 250 | GAPSGSL | 3081 | GGAGCTCCGTCAGGATCCCTT | 3082 | 3900 | 1538 | 2362 |
| 251 | TSGNAGL | 3083 | ACAAGCGGGAACGCGGGCCTC | 3084 | 3899 | 3899 | 0 |
| 252 | REQQKLW | 3085 | AGGGAACAACAAAAATTATGG | 3086 | 3898 | 3425 | 473 |
| 253 | NVTGVVL | 3087 | AACGTAACTGGAGTTGTCCTT | 3088 | 3896 | 2913 | 983 |
| 254 | MESVTQG | 3089 | ATGGAAAGCGTAACCCAAGGA | 3090 | 3884 | 3884 | 0 |
| 255 | TTVKVSP | 3091 | ACGACTGTGAAGGTTAGTCCT | 3092 | 3876 | 3876 | 0 |
| 256 | GLPDTMA | 3093 | GGTCTGCCAGACACGATGGCC | 3094 | 3869 | 0 | 3869 |
| 257 | QSQTADA | 3095 | CAGTCTCAGACGGCTGATGCT | 3096 | 3861 | 3861 | 0 |
| 258 | TLTLSMR | 3097 | ACACTTACGCTTTCAATGAGG | 3098 | 3854 | 0 | 3854 |
| 259 | GNPGSHS | 3099 | GGGAATCCGGGTTCTCATAGT | 3100 | 3849 | 2000 | 1849 |
| 260 | SGNQPRM | 3101 | TCTGGGAATCAGCCTAGGATG | 3102 | 3830 | 2466 | 1364 |
| 261 | SHGSDLK | 3103 | TCTCATGGTTCTGATTTGAAG | 3104 | 3828 | 3516 | 312 |
| 262 | SLGEGRH | 3105 | TCGTTGGGTGAGGGTCGGCAT | 3106 | 3816 | 2000 | 1816 |
| 263 | AGISSQP | 3107 | GCTGGCATCAGCTCACAACCA | 3108 | 3812 | 3288 | 524 |
| 264 | SLGEARP | 3109 | TCTTTAGGGGAAGCGCGTCCC | 3110 | 3811 | 3390 | 421 |
| 265 | IYSDGSS | 3111 | ATTTATAGTGATGGGTCGTCT | 3112 | 3807 | 1426 | 2381 |
| 266 | RVSLAVK | 3113 | AGGGTGTCGCTGGCTGTGAAG | 3114 | 3802 | 3456 | 346 |
| 267 | HGTGNTY | 3115 | CACGGAACCGGTAACACATAC | 3116 | 3799 | 2000 | 1799 |
| 268 | TSERGSL | 3117 | ACGAGTGAGAGGGGGTCGCTG | 3118 | 3790 | 3071 | 718 |
| 269 | ASPQVSL | 3119 | GCGAGTCCGCAGGTGTCGCTT | 3120 | 3789 | 1789 | 2000 |
| 270 | VVQDPGR | 3121 | GTTGTTCAGGATCCTGGGCGT | 3122 | 3781 | 3781 | 0 |
| 271 | QGGDSGG | 3123 | CAGGGTGGTGATAGTGGGGGT | 3124 | 3781 | 2000 | 1781 |
| 272 | TADARAL | 3125 | ACAGCGGACGCGCGCGCTTTG | 3126 | 3778 | 3778 | 0 |
| 273 | TNGHSQV | 3127 | ACTAACGGACACAGCCAAGTC | 3128 | 3763 | 1456 | 2307 |
| 274 | RNQAEEM | 3129 | CGTAACCAAGCCGAAGAAATG | 3130 | 3762 | 3762 | 0 |
| 275 | VAVSSNK | 3131 | GTTGCTGTTTCTTCGAATAAG | 3132 | 3759 | 1551 | 2208 |
| 276 | KTAQVQP | 3133 | AAAACCGCTCAAGTCCAACCT | 3134 | 3750 | 3483 | 267 |
| 277 | AVGSDGV | 3135 | GCTGTGGGTTCTGATGGTGTT | 3136 | 3748 | 1748 | 2000 |
| 278 | LNSSTQR | 3137 | TTGAATTCTAGTACGCAGCGT | 3138 | 3738 | 1738 | 2000 |
| 279 | QMKSRSD | 3139 | CAGATGAAGTCTCGTTCTGAT | 3140 | 3727 | 3470 | 257 |
| 280 | SVQITGL | 3141 | TCTGTGCAGATTACTGGTTTG | 3142 | 3727 | 1338 | 2389 |
| 281 | STLQGVA | 3143 | AGTACGCTGCAGGGTGTGGCT | 3144 | 3726 | 3726 | 0 |
| 282 | KLAEGVR | 3145 | AAGCTTGCTGAGGGGGTTAGG | 3146 | 3723 | 2000 | 1723 |
| 283 | TDKQNAF | 3147 | ACAGACAAACAAAACGCCTTC | 3148 | 3720 | 1664 | 2056 |
| 284 | REIRVSV | 3149 | CGAGAAATCAGAGTATCCGTC | 3150 | 3710 | 1710 | 2000 |
| 285 | QVRDAKT | 3151 | CAGGTGCGTGATGCTAAGACT | 3152 | 3698 | 2000 | 1698 |
| 286 | VEGPTTN | 3153 | GTCGAAGGGCCTACAACGAAC | 3154 | 3694 | 0 | 3694 |
| 287 | SDRTAVV | 3155 | AGTGATCGGACGGCGGTTGTT | 3156 | 3693 | 734 | 2959 |
| 288 | QSDNHGR | 3157 | CAGTCGGATAATCATGGTAGG | 3158 | 3692 | 3163 | 529 |
| 289 | ETQGRQF | 3159 | GAGACTCAGGGTCGTCAGTTT | 3160 | 3677 | 3677 | 0 |
| 290 | PSVSTLS | 3161 | CCGTCGGTCAGCACACTGTCG | 3162 | 3676 | 3367 | 309 |
| 291 | RGQSDPA | 3163 | CGGGGGCAGTCTGATCCGGCG | 3164 | 3652 | 3652 | 0 |
| 292 | AKESGLM | 3165 | GCAAAAGAATCCGGCCTAATG | 3166 | 3652 | 0 | 3652 |
| 293 | AEGRSAM | 3167 | GCGGAGGGGAGGAGTGCTATG | 3168 | 3648 | 2000 | 1648 |
| 294 | RLNEHVA | 3169 | CGGTTGAACGAACACGTTGCC | 3170 | 3640 | 2000 | 1640 |
| 295 | TGASTFV | 3171 | ACCGGAGCCAGTACATTCGTA | 3172 | 3640 | 1690 | 1950 |
| 296 | ALIRDNV | 3173 | GCTCTGATTCGTGATAATGTT | 3174 | 3628 | 2000 | 1628 |
| 297 | PHAATPG | 3175 | CCTCATGCTGCGACTCCTGGG | 3176 | 3625 | 1625 | 2000 |
| 298 | RSAGTSS | 3177 | CGTTCGGCGGGTACTTCGTCG | 3178 | 3624 | 3624 | 0 |
| 299 | SKAEGPV | 3179 | TCGAAGGCTGAGGGTCCGGTT | 3180 | 3620 | 3620 | 0 |
| 300 | LSLRDGV | 3181 | CTCTCGCTCCGGGACGGAGTC | 3182 | 3619 | 2000 | 1619 |
| 301 | TVSEQPR | 3183 | ACGGTTTCGGAGCAGCCGCGT | 3184 | 3616 | 3616 | 0 |
| 302 | LSLGSQL | 3185 | CTGTCTCTGGGGTCGCAGCTG | 3186 | 3606 | 1380 | 2226 |
| 303 | NGTAGDR | 3187 | AACGGAACCGCAGGGGACCGC | 3188 | 3604 | 3347 | 257 |
| 304 | VQVSSVA | 3189 | GTTCAGGTTTCTTCTGTGGCT | 3190 | 3601 | 1601 | 2000 |
| 305 | SDGKTHP | 3191 | TCGGATGGTAAGACTCATCCG | 3192 | 3601 | 1190 | 2411 |
| 306 | NEPSVNT | 3193 | AACGAACCCTCGGTAAACACG | 3194 | 3599 | 3599 | 0 |
| 307 | DVADSKR | 3195 | GATGTTGCTGATTCTAAGCGT | 3196 | 3590 | 3097 | 493 |
| 308 | GVAGTYS | 3197 | GGCGTCGCAGGTACCTACAGT | 3198 | 3583 | 3583 | 0 |
| 309 | NIKDVNR | 3199 | AATATTAAGGATGTTAATAGG | 3200 | 3577 | 2000 | 1577 |
| 310 | DLVLLHR | 3201 | GATCTTGTTTTGTTGCATAGG | 3202 | 3568 | 0 | 3568 |
| 311 | SNGTVTI | 3203 | TCAAACGGGACTGTAACAATA | 3204 | 3559 | 3230 | 329 |
| 312 | LANTLSV | 3205 | CTGGCTAATACGTTGAGTGTT | 3206 | 3556 | 3556 | 0 |
| 313 | PTQVTLR | 3207 | CCTACTCAGGTGACGCTTCGG | 3208 | 3548 | 3548 | 0 |
| 314 | ILGGLAV | 3209 | ATATTGGGCGGCCTAGCCGTG | 3210 | 3529 | 1529 | 2000 |
| 315 | TAVHSAS | 3211 | ACGGCTGTGCATTCGGCTTCG | 3212 | 3526 | 3141 | 385 |
| 316 | TSLSQDR | 3213 | ACGAGTTTGTCGCAGGATAGG | 3214 | 3524 | 0 | 3524 |
| 317 | LDTTARL | 3215 | CTTGATACTACTGCTCGTCTT | 3216 | 3517 | 1517 | 2000 |
| 318 | GASDQLS | 3217 | GGTGCTTCGGATCAGCTTTCT | 3218 | 3514 | 3514 | 0 |
| 319 | EKVAPTP | 3219 | GAGAAGGTTGCTCCGACGCCT | 3220 | 3514 | 2000 | 1514 |
| 320 | AAGGQVL | 3221 | GCGGCGGGTGGGCAGGTTCTG | 3222 | 3512 | 3512 | 0 |
| 321 | PGDRSPS | 3223 | CCGGGTGATCGTTCGCCTTCT | 3224 | 3508 | 3508 | 0 |
| 322 | DALSRMA | 3225 | GACGCATTGTCACGTATGGCT | 3226 | 3498 | 0 | 3498 |
| 323 | TAGQVSK | 3227 | ACTGCGGGTCAGGTGTCTAAG | 3228 | 3495 | 0 | 3495 |
| 324 | LAKDSGG | 3229 | TTGGCTAAGGATTCTGGGGGG | 3230 | 3488 | 1163 | 2325 |
| 325 | SAGRADL | 3231 | AGTGCAGGTAGAGCCGACCTC | 3232 | 3482 | 3482 | 0 |
| 326 | TTAAIVS | 3233 | ACAACAGCTGCGATAGTATCC | 3234 | 3474 | 3117 | 357 |
| 327 | SMGQKEL | 3235 | AGCATGGGCCAAAAAGAACTA | 3236 | 3474 | 2000 | 1474 |
| 328 | PQKGGGV | 3237 | CCTCAGAAGGGTGGTGGGGTG | 3238 | 3472 | 2000 | 1472 |
| 329 | GAVSSIK | 3239 | GGGGCCGTGAGTAGTATCAAA | 3240 | 3472 | 1150 | 2322 |
| 330 | LSSGVSK | 3241 | CTCTCATCGGGTGTATCCAAA | 3242 | 3466 | 1524 | 1942 |
| 331 | SVGLTNG | 3243 | AGTGTGGGTCTGACGAATGGT | 3244 | 3465 | 780 | 2685 |
| 332 | VKQTDVA | 3245 | GTTAAGCAGACGGATGTTGCT | 3246 | 3461 | 3461 | 0 |
| 333 | EAVRLSA | 3247 | GAAGCCGTACGGCTGTCCGCA | 3248 | 3461 | 1353 | 2108 |
| 334 | GTLTSGY | 3249 | GGCACACTCACGAGCGGATAC | 3250 | 3460 | 2000 | 1460 |
| 335 | KASDTPK | 3251 | AAGGCTTCTGATACTCCTAAG | 3252 | 3457 | 3451 | 6 |
| 336 | RGGVTGE | 3253 | CGTGGTGGCGTGACAGGAGAA | 3254 | 3450 | 3450 | 0 |
| 337 | AVLAGYR | 3255 | GCAGTCCTTGCAGGCTACCGT | 3256 | 3448 | 3448 | 0 |
| 338 | GTYSTSL | 3257 | GGTACGTACAGCACCAGCCTC | 3258 | 3448 | 2000 | 1448 |
| 339 | TSLGLVV | 3259 | ACATCTCTTGGGTTGGTAGTT | 3260 | 3445 | 3445 | 0 |
| 340 | QVRDTKI | 3261 | CAGGTGCGTGATACTAAGATT | 3262 | 3445 | 3445 | 0 |
| 341 | SMGQKEL | 3263 | TCTATGGGGCAGAAGGAGCTT | 3264 | 3437 | 3247 | 190 |
| 342 | KEAPHGV | 3265 | AAAGAAGCCCCCCACGGTGTA | 3266 | 3431 | 1077 | 2354 |
| 343 | KSLSENS | 3267 | AAATCATTGTCCGAAAACAGC | 3268 | 3422 | 3152 | 270 |
| 344 | SEVSKGK | 3269 | AGTGAGGTTAGTAAGGGTAAG | 3270 | 3420 | 3087 | 333 |
| 345 | RTQTDLG | 3271 | CGGACGCAGACGGATCTTGGT | 3272 | 3414 | 3414 | 0 |
| 346 | TTLGATA | 3273 | ACGACGTTGGGTGCTACGGCT | 3274 | 3410 | 2000 | 1410 |
| 347 | ITSGTGT | 3275 | ATTACTAGTGGTACGGGTACT | 3276 | 3408 | 3290 | 118 |
| 348 | QTQTAVR | 3277 | CAGACTCAGACGGCTGTTCGT | 3278 | 3408 | 2000 | 1408 |
| 349 | LADNHGR | 3279 | TTGGCTGACAACCACGGCCGT | 3280 | 3407 | 1407 | 2000 |
| 350 | NQINAGV | 3281 | AACCAAATCAACGCCGGCGTG | 3282 | 3399 | 1399 | 2000 |
| 351 | SHGSDSR | 3283 | TCTCATGGTTCTGATTCGAGG | 3284 | 3385 | 2963 | 421 |
| 352 | SQKEVAT | 3285 | AGCCAAAAAGAAGTTGCCACC | 3286 | 3383 | 3383 | 0 |
| 353 | KEGAVYV | 3287 | AAGGAGGGGGCGGTGTATGTG | 3288 | 3380 | 1615 | 1765 |
| 354 | VSGSISK | 3289 | GTTTCGGGGAGTATTTCTAAG | 3290 | 3370 | 1230 | 2140 |
| 355 | VSPGKLH | 3291 | GTCAGTCCTGGCAAACTCCAC | 3292 | 3367 | 2000 | 1367 |
| 356 | GETNTNI | 3293 | GGGGAAACAAACACCAACATC | 3294 | 3365 | 3365 | 0 |
| 357 | TYGSGPT | 3295 | ACTTATGGTTCTGGGCCTACT | 3296 | 3362 | 1362 | 2000 |
| 358 | SSGQLGV | 3297 | TCCTCCGGCCAATTAGGCGTT | 3298 | 3360 | 2800 | 560 |
| 359 | WAISDGY | 3299 | TGGGCTATATCAGACGGATAC | 3300 | 3360 | 1931 | 1429 |
| 360 | HAEGARS | 3301 | CATGCGGAGGGTGCTCGTAGT | 3302 | 3356 | 3356 | 0 |
| 361 | SGEALRL | 3303 | TCTGGGGAGGCGCTTAGGCTT | 3304 | 3355 | 0 | 3355 |
| 362 | SMGIGAV | 3305 | TCTATGGGGATTGGTGCGGTT | 3306 | 3347 | 3347 | 0 |
| 363 | MVKQQLT | 3307 | ATGGTCAAACAACAACTCACC | 3308 | 3347 | 2974 | 373 |
| 364 | LTSGQAV | 3309 | TTGACATCTGGCCAAGCAGTC | 3310 | 3347 | 1067 | 2280 |
| 365 | LSLTNGV | 3311 | TTGAGCCTTACAAACGGTGTG | 3312 | 3346 | 3346 | 0 |
| 366 | SGANLSI | 3313 | TCAGGAGCAAACCTCAGCATC | 3314 | 3345 | 2000 | 1345 |
| 367 | SHLNTTP | 3315 | TCGCATTTGAATACTACTCCT | 3316 | 3342 | 1999 | 1343 |
| 368 | VMSGTSH | 3317 | GTGATGTCAGGCACGTCTCAC | 3318 | 3339 | 1339 | 2000 |
| 369 | REQQKIW | 3319 | CGTGAGCAGCAGAAGATTTGG | 3320 | 3332 | 2296 | 1037 |
| 370 | DGQRLGA | 3321 | GACGGCCAAAGATTAGGTGCG | 3322 | 3331 | 1848 | 1483 |
| 371 | VLASPGH | 3323 | GTACTAGCGAGTCCGGGACAC | 3324 | 3328 | 0 | 3328 |
| 372 | NSKDGHR | 3325 | AACTCAAAAGACGGACACCGT | 3326 | 3326 | 3326 | 0 |
| 373 | KNGGHVL | 3327 | AAAAACGGCGGCCACGTGTTG | 3328 | 3326 | 3162 | 164 |
| 374 | ALSGLAR | 3329 | GCCCTCTCAGGCTTAGCACGT | 3330 | 3323 | 2000 | 1323 |
| 375 | TSGNAGL | 3331 | ACTTCTGGTAATGCTGGGCTT | 3332 | 3322 | 2722 | 600 |
| 376 | AGSDYTV | 3333 | GCTGGTAGTGATTATACTGTG | 3334 | 3321 | 1325 | 1996 |
| 377 | TQIETRR | 3335 | ACGCAGATTGAGACGAGGCGG | 3336 | 3317 | 3317 | 0 |
| 378 | LISSTQR | 3337 | TTGATTTCTAGTACGCAGCGT | 3338 | 3313 | 2000 | 1313 |
| 379 | KIAEGIR | 3339 | AAGATTGCTGAGGGGATTAGG | 3340 | 3310 | 0 | 3310 |
| 380 | PSPGSQL | 3341 | CCGTCTCCGGGGTCGCAGCTG | 3342 | 3307 | 0 | 3307 |
| 381 | RVESADL | 3343 | CGCGTAGAATCCGCAGACCTC | 3344 | 3301 | 2000 | 1301 |
| 382 | KGSDSPK | 3345 | AAGGGTTCTGATTCTCCTAAG | 3346 | 3293 | 2985 | 308 |
| 383 | TVGHADK | 3347 | ACGGTTGGGCATGCTGATAAG | 3348 | 3290 | 959 | 2332 |
| 384 | VDRSGIP | 3349 | GTAGACCGTTCTGGAATACCA | 3350 | 3289 | 0 | 3289 |
| 385 | QVRDTKT | 3351 | CAGGTGCGTGATACTAAGACT | 3352 | 3288 | 1288 | 2000 |
| 386 | RNNVETT | 3353 | CGTAACAACGTGGAAACAACA | 3354 | 3281 | 3281 | 0 |
| 387 | AVISMTP | 3355 | GCCGTAATATCTATGACCCCG | 3356 | 3273 | 1273 | 2000 |
| 388 | ATEKAVR | 3357 | GCGACGGAGAAGGCTGTGAGG | 3358 | 3269 | 2811 | 458 |
| 389 | SADVTAR | 3359 | AGTGCTGATGTGACGGCGAGG | 3360 | 3267 | 1267 | 2000 |
| 390 | GTGGAVR | 3361 | GGAACCGGCGGGGCAGTGCGC | 3362 | 3266 | 2000 | 1266 |
| 391 | RTMGDST | 3363 | CGTACAATGGGCGACTCAACG | 3364 | 3257 | 3257 | 0 |
| 392 | LGDSAKP | 3365 | CTAGGCGACTCAGCCAAACCT | 3366 | 3257 | 2000 | 1257 |
| 393 | VTQGTSL | 3367 | GTTACGCAGGGGACTTCTCTG | 3368 | 3252 | 1435 | 1817 |
| 394 | IAVGLTV | 3369 | ATTGCGGTGGGGCTGACTGTT | 3370 | 3251 | 0 | 3251 |
| 395 | FTPGTAT | 3371 | TTTACTCCTGGTACGGCTACT | 3372 | 3235 | 2000 | 1235 |
| 396 | LGDSASP | 3373 | CTTGGGGATTCTGCTTCGCCG | 3374 | 3224 | 1224 | 2000 |
| 397 | VGVPTTN | 3375 | GTAGGAGTACCCACCACGAAC | 3376 | 3217 | 1217 | 2000 |
| 398 | LLADKRA | 3377 | CTTCTTGCTGATAAGCGTGCG | 3378 | 3215 | 1004 | 2211 |
| 399 | TDGRGDR | 3379 | ACGGATGGTCGGGGTGATAGG | 3380 | 3212 | 779 | 2433 |
| 400 | NLIKPFL | 3381 | AATTTGATTAAGCCTTTTCTT | 3382 | 3209 | 2000 | 1209 |
| 401 | EIALTVH | 3383 | GAAATAGCACTGACAGTACAC | 3384 | 3207 | 0 | 3207 |
| 402 | NSKDVQR | 3385 | AATAGTAAGGATGTTCAGAGG | 3386 | 3206 | 2470 | 736 |
| 403 | DLVLLHR | 3387 | GACTTAGTCCTCCTTCACCGA | 3388 | 3199 | 0 | 3199 |
| 404 | MSVQDRG | 3389 | ATGTCCGTTCAAGACCGAGGC | 3390 | 3199 | 0 | 3199 |
| 405 | DRSTTVP | 3391 | GATCGTAGTACGACGGTTCCT | 3392 | 3197 | 3197 | 0 |
| 406 | LSRGSQL | 3393 | TTAAGTCGCGGTTCACAACTT | 3394 | 3197 | 2950 | 247 |
| 407 | THLSSTR | 3395 | ACGCATCTGAGTAGTACTCGT | 3396 | 3196 | 3196 | 0 |
| 408 | MNGGHAL | 3397 | ATGAACGGAGGGCACGCATTG | 3398 | 3193 | 3193 | 0 |
| 409 | SPSAFPI | 3399 | TCGCCTAGTGCATTCCCAATC | 3400 | 3192 | 0 | 3192 |
| 410 | DYGSTGR | 3401 | GATTATGGTTCTACGGGGCGG | 3402 | 3185 | 3185 | 0 |
| 411 | QVAQQGA | 3403 | CAAGTCGCACAACAAGGCGCT | 3404 | 3184 | 2792 | 392 |
| 412 | IGSGVLA | 3405 | ATTGGTAGTGGTGTTCTTGCT | 3406 | 3184 | 0 | 3184 |
| 413 | VGHGGVD | 3407 | GTGGGTCATGGTGGTGTGGAT | 3408 | 3176 | 1176 | 2000 |
| 414 | AVGSTVK | 3409 | GCGGTTGGGTCGACGGTGAAG | 3410 | 3170 | 3170 | 0 |
| 415 | SGEQLRI | 3411 | TCTGGGGAGCAGCTTAGGATT | 3412 | 3168 | 2000 | 1168 |
| 416 | RNNVDST | 3413 | CGGAATAATGTTGATTCTACG | 3414 | 3164 | 3164 | 0 |
| 417 | AVGTAIG | 3415 | GCGGTAGGCACGGCAATCGGC | 3416 | 3160 | 2000 | 1160 |
| 418 | VAGLGGL | 3417 | GTTGCGGGTTTGGGGGGGCTT | 3418 | 3154 | 0 | 3154 |
| 419 | RTSAGVV | 3419 | AGGACGAGTGCGGGTGTTGTG | 3420 | 3151 | 3151 | 0 |
| 420 | FTSGTGN | 3421 | TTCACGAGCGGAACAGGCAAC | 3422 | 3149 | 3149 | 0 |
| 421 | QREATRI | 3423 | CAGCGTGAGGCGACGCGGATT | 3424 | 3140 | 2000 | 1140 |
| 422 | LNNPVQV | 3425 | CTGAATAATCCTGTGCAGGTT | 3426 | 3137 | 0 | 3137 |
| 423 | LISTTLR | 3427 | TTGATTTCTACTACGCTGCGT | 3428 | 3136 | 0 | 3136 |
| 424 | GGTVSGH | 3429 | GGAGGGACTGTATCTGGACAC | 3430 | 3134 | 2000 | 1134 |
| 425 | AGTLYAR | 3431 | GCGGGGACTCTGTATGCTCGT | 3432 | 3134 | 2000 | 1134 |
| 426 | GQSSNLH | 3433 | GGACAAAGTAGCAACTTGCAC | 3434 | 3132 | 0 | 3132 |
| 427 | DVSGSVI | 3435 | GACGTAAGCGGCTCCGTAATC | 3436 | 3130 | 2000 | 1130 |
| 428 | KLAEGVR | 3437 | AAATTGGCAGAAGGAGTCAGA | 3438 | 3123 | 2000 | 1123 |
| 429 | SGLQVSI | 3439 | TCAGGATTGCAAGTGTCGATA | 3440 | 3120 | 3120 | 0 |
| 430 | QTGAIVV | 3441 | CAAACAGGAGCAATCGTTGTC | 3442 | 3113 | 1671 | 1442 |
| 431 | LEANVSH | 3443 | CTGGAAGCTAACGTGAGTCAC | 3444 | 3112 | 2000 | 1112 |
| 432 | ALSGLSK | 3445 | GCTCTTTCTGGTCTTTCTAAG | 3446 | 3108 | 0 | 3108 |
| 433 | MGKQTTL | 3447 | ATGGGGAAGCAGACTACGCTG | 3448 | 3107 | 2664 | 443 |
| 434 | HHSQYGA | 3449 | CACCACTCGCAATACGGCGCT | 3450 | 3106 | 0 | 3106 |
| 435 | TGLQGSI | 3451 | ACCGGCCTTCAAGGATCTATA | 3452 | 3101 | 3101 | 0 |
| 436 | LISGEKT | 3453 | TTGATTTCTGGTGAGAAGACG | 3454 | 3101 | 2000 | 1101 |
| 437 | RSASGNE | 3455 | CGGAGTGCTAGTGGTAATGAG | 3456 | 3099 | 3099 | 0 |
| 438 | SEKSVPL | 3457 | TCCGAAAAAAGCGTACCACTG | 3458 | 3097 | 2000 | 1097 |
| 439 | VLDSRSP | 3459 | GTTCTGGATAGTAGGAGTCCG | 3460 | 3096 | 2423 | 673 |
| 440 | QGGNSGR | 3461 | CAAGGAGGCAACTCAGGTAGG | 3462 | 3095 | 1095 | 2000 |
| 441 | SAVASGK | 3463 | TCGGCGGTGGCGTCGGGTAAG | 3464 | 3094 | 2000 | 1094 |
| 442 | AQGPQTG | 3465 | GCGCAGGGTCCGCAGACTGGT | 3466 | 3092 | 1092 | 2000 |
| 443 | MNVGNVL | 3467 | ATGAACGTTGGGAACGTGCTC | 3468 | 3092 | 0 | 3092 |
| 444 | VLGGTGK | 3469 | GTCCTCGGAGGTACCGGTAAA | 3470 | 3089 | 2941 | 148 |
| 445 | KSHSEIS | 3471 | AAATCCCACAGTGAAATCAGC | 3472 | 3088 | 0 | 3088 |
| 446 | SDSRVSY | 3473 | AGTGACTCCCGAGTATCGTAC | 3474 | 3087 | 0 | 3087 |
| 447 | YTAGSMA | 3475 | TATACGGCGGGGTCTATGGCG | 3476 | 3086 | 1086 | 2000 |
| 448 | TRFDGSG | 3477 | ACGCGTTTTGATGGTTCGGGT | 3478 | 3084 | 1084 | 2000 |
| 449 | QREAERI | 3479 | CAGCGTGAGGCGGAGCGGATT | 3480 | 3077 | 2000 | 1077 |
| 450 | KNPAVDP | 3481 | AAAAACCCCGCAGTCGACCCG | 3482 | 3076 | 3076 | 0 |
| 451 | FSSETLT | 3483 | TTCAGCTCCGAAACCTTGACC | 3484 | 3072 | 1594 | 1478 |
| 452 | YGNSGVI | 3485 | TACGGCAACTCGGGGGTCATA | 3486 | 3062 | 694 | 2369 |
| 453 | KNPGADP | 3487 | AAAAACCCTGGTGCCGACCCC | 3488 | 3058 | 3058 | 0 |
| 454 | LAIAGTM | 3489 | CTTGCTATTGCGGGGACTATG | 3490 | 3057 | 0 | 3057 |
| 455 | SNLGNTS | 3491 | TCGAATCTGGGTAATACTAGT | 3492 | 3052 | 1052 | 2000 |
| 456 | PIQLGQA | 3493 | CCGATTCAGTTGGGTCAGGCT | 3494 | 3051 | 2000 | 1051 |
| 457 | KTETGYE | 3495 | AAGACTGAGACTGGTTATGAG | 3496 | 3051 | 2000 | 1051 |
| 458 | VTKVSHV | 3497 | GTCACAAAAGTAAGTCACGTC | 3498 | 3046 | 2000 | 1046 |
| 459 | AGGGVPR | 3499 | GCAGGAGGCGGCGTCCCACGT | 3500 | 3043 | 1875 | 1168 |
| 460 | ADKGGVA | 3501 | GCTGATAAGGGGGGTGTGGCT | 3502 | 3042 | 2903 | 139 |
| 461 | SEGISRY | 3503 | TCAGAAGGCATATCTCGGTAC | 3504 | 3040 | 0 | 3040 |
| 462 | LDHGGVD | 3505 | CTCGACCACGGAGGAGTAGAC | 3506 | 3038 | 2000 | 1038 |
| 463 | NEQSVKT | 3507 | AACGAACAAAGCGTTAAAACC | 3508 | 3037 | 2000 | 1037 |
| 464 | SARDMTR | 3509 | AGCGCCCGCGACATGACTCGT | 3510 | 3034 | 2000 | 1034 |
| 465 | TSVGMQV | 3511 | ACGTCGGTTGGGATGCAGGTT | 3512 | 3033 | 738 | 2295 |
| 466 | VQAGKEL | 3513 | GTGCAGGCTGGTAAGGAGTTG | 3514 | 3033 | 0 | 3033 |
| 467 | NASAGDR | 3515 | AATGCGAGTGCGGGTGATCGT | 3516 | 3028 | 3028 | 0 |
| 468 | AAGVILK | 3517 | GCGGCGGGTGTTATTCTGAAG | 3518 | 3028 | 3028 | 0 |
| 469 | SGAEGGR | 3519 | TCTGGTGCTGAGGGTGGTCGG | 3520 | 3028 | 3028 | 0 |
| 470 | NRQEHSN | 3521 | AACCGCCAAGAACACAGCAAC | 3522 | 3028 | 2000 | 1028 |
| 471 | AADGSVR | 3523 | GCCGCAGACGGAAGTGTTAGG | 3524 | 3028 | 2000 | 1028 |
| 472 | SGANLSM | 3525 | TCTGGTGCGAATTTGTCTATG | 3526 | 3027 | 1027 | 2000 |
| 473 | HSSGWTS | 3527 | CACTCGAGTGGATGGACCAGC | 3528 | 3022 | 0 | 3022 |
| 474 | NLGVVQP | 3529 | AATTTGGGTGTGGTTCAGCCG | 3530 | 3022 | 0 | 3022 |
| 475 | HSTGAEK | 3531 | CATTCGACGGGTGCGGAGAAG | 3532 | 3020 | 3020 | 0 |
| 476 | NLSISER | 3533 | AATTTGTCGATTTCTGAGCGG | 3534 | 3018 | 0 | 3018 |
| 477 | TNLADTA | 3535 | ACTAATCTGGCTGATACTGCG | 3536 | 3013 | 2000 | 1013 |
| 478 | RSSGTSA | 3537 | AGATCATCCGGGACCTCAGCA | 3538 | 3011 | 3011 | 0 |
| 479 | KNGGHVL | 3539 | AAGAATGGGGGTCATGTTCTG | 3540 | 3010 | 788 | 2222 |
| 480 | GSSGGHF | 3541 | GGAAGCTCGGGTGGACACTTC | 3542 | 3005 | 2000 | 1005 |
| 481 | ISHSESV | 3543 | ATTAGTCATTCGGAGAGTGTG | 3544 | 3005 | 0 | 3005 |
| 482 | VTGVSRV | 3545 | GTTACGGGTGTGAGTCGTGTG | 3546 | 3003 | 2000 | 1003 |
| 483 | QGGNSGA | 3547 | CAGGGTGGTAATAGTGGGGCT | 3548 | 3003 | 0 | 3003 |
| 484 | AMPTSGH | 3549 | GCGATGCCGACGAGTGGGCAT | 3550 | 3000 | 0 | 3000 |
| 485 | TLTNGMP | 3551 | ACCTTGACCAACGGTATGCCA | 3552 | 2999 | 0 | 2999 |
| 486 | SHGTDSK | 3553 | TCCCACGGAACGGACAGTAAA | 3554 | 2998 | 2998 | 0 |
| 487 | WSDRESR | 3555 | TGGTCTGACCGCGAATCTAGG | 3556 | 2997 | 1759 | 1238 |
| 488 | KEIRVSV | 3557 | AAAGAAATAAGGGTCTCCGTG | 3558 | 2992 | 2992 | 0 |
| 489 | FAGVTQA | 3559 | TTTGCGGGGGTTACGCAGGCG | 3560 | 2989 | 0 | 2989 |
| 490 | DSHVSGV | 3561 | GACTCTCACGTATCCGGAGTG | 3562 | 2988 | 1654 | 1334 |
| 491 | LLKESTP | 3563 | CTCCTTAAAGAAAGTACACCT | 3564 | 2984 | 0 | 2984 |
| 492 | ADREVRY | 3565 | GCGGATCGGGAGGTGCGTTAT | 3566 | 2982 | 0 | 2982 |
| 493 | MNGGHGL | 3567 | ATGAATGGGGGTCATGGTCTG | 3568 | 2980 | 2000 | 980 |
| 494 | SLRDVEG | 3569 | TCGCTGCGTGATGTGGAGGGT | 3570 | 2979 | 2000 | 979 |
| 495 | SKSGVVA | 3571 | AGTAAGTCTGGTGTGGTGGCG | 3572 | 2979 | 1575 | 1404 |
| 496 | RNEGSVP | 3573 | CGAAACGAAGGCTCGGTCCCT | 3574 | 2978 | 2000 | 978 |
| 497 | NLQGNAL | 3575 | AACTTACAAGGCAACGCGCTA | 3576 | 2977 | 2000 | 977 |
| 498 | YSTTAGM | 3577 | TATTCGACTACGGCTGGTATG | 3578 | 2973 | 0 | 2973 |
| 499 | AADGSVR | 3579 | GCGGCGGATGGTTCTGTGCGG | 3580 | 2972 | 2000 | 972 |
| 500 | VGNMLSV | 3581 | GTCGGGAACATGCTATCTGTG | 3582 | 2970 | 2000 | 970 |
| 501 | KEYITAV | 3583 | AAGGAGTATATTACGGCTGTG | 3584 | 2969 | 2969 | 0 |
| 502 | ANAGMSR | 3585 | GCGAATGCTGGGATGTCTAGG | 3586 | 2969 | 2000 | 969 |
| 503 | HTVEGAL | 3587 | CATACGGTTGAGGGGGCGCTG | 3588 | 2967 | 2000 | 967 |
| 504 | NHQSLVN | 3589 | AACCACCAATCGCTCGTTAAC | 3590 | 2963 | 2000 | 963 |
| 505 | VSGTLLA | 3591 | GTATCCGGCACGTTACTGGCA | 3592 | 2963 | 0 | 2963 |
| 506 | QSRPDAL | 3593 | CAGAGTCGTCCGGATGCTCTT | 3594 | 2958 | 2000 | 958 |
| 507 | AGVVNGL | 3595 | GCGGGGGTGGTGAATGGTTTG | 3596 | 2956 | 2000 | 956 |
| 508 | RGGETSE | 3597 | CGGGGGGGTGAGACGTCTGAG | 3598 | 2953 | 2953 | 0 |
| 509 | LSLTVGV | 3599 | CTGAGTTTGACTGTTGGGGTT | 3600 | 2952 | 2000 | 952 |
| 510 | HISSLAM | 3601 | CACATATCCTCCCTTGCCATG | 3602 | 2951 | 0 | 2951 |
| 511 | AFSGGET | 3603 | GCCTTCAGCGGTGGTGAAACG | 3604 | 2948 | 1766 | 1182 |
| 512 | LRGTENQ | 3605 | TTGCGTGGGACGGAGAATCAG | 3606 | 2948 | 4 | 2944 |
| 513 | QSQTAVD | 3607 | CAATCACAAACAGCAGTCGAC | 3608 | 2946 | 0 | 2946 |
| 514 | ASSATLL | 3609 | GCGTCTAGTGCTACTTTGTTG | 3610 | 2945 | 2000 | 945 |
| 515 | GQALVSS | 3611 | GGTCAAGCTTTAGTGTCGAGT | 3612 | 2945 | 0 | 2945 |
| 516 | TAVHSTS | 3613 | ACGGCTGTGCATTCGACTTCG | 3614 | 2943 | 2000 | 943 |
| 517 | KNPGLDH | 3615 | AAAAACCCAGGACTAGACCAC | 3616 | 2940 | 2729 | 211 |
| 518 | KSGLLID | 3617 | AAAAGCGGCCTTCTTATAGAC | 3618 | 2937 | 2937 | 0 |
| 519 | SGVTPLR | 3619 | TCGGGAGTAACTCCACTCCGT | 3620 | 2931 | 0 | 2931 |
| 520 | REEQKVW | 3621 | AGAGAAGAACAAAAAGTCTGG | 3622 | 2926 | 2000 | 926 |
| 521 | LSQGSQM | 3623 | CTTAGTCAAGGATCCCAAATG | 3624 | 2926 | 2000 | 926 |
| 522 | LSLTATS | 3625 | CTGTCTCTGACGGCTACGTCT | 3626 | 2926 | 1867 | 1059 |
| 523 | KGSDTPK | 3627 | AAGGGTTCTGATACTCCTAAG | 3628 | 2926 | 0 | 2926 |
| 524 | SKPENAL | 3629 | TCGAAACCCGAAAACGCACTA | 3630 | 2925 | 2000 | 925 |
| 525 | GGTNSAH | 3631 | GGGGGTACGAATAGTGCTCAT | 3632 | 2924 | 2000 | 924 |
| 526 | FSTDTLS | 3633 | TTCAGCACCGACACCTTATCG | 3634 | 2924 | 0 | 2924 |
| 527 | SVDVTAK | 3635 | AGTGTTGATGTGACGGCGAAG | 3636 | 2917 | 917 | 2000 |
| 528 | VAQGSVV | 3637 | GTGGCTCAGGGGTCGGTTGTT | 3638 | 2916 | 2000 | 916 |
| 529 | TSGSGTS | 3639 | ACTTCTGGTTCTGGTACGTCG | 3640 | 2916 | 0 | 2916 |
| 530 | KEVRVSV | 3641 | AAGGAGGTTCGTGTGTCGGTT | 3642 | 2909 | 2909 | 0 |
| 531 | RVDSVQL | 3643 | AGAGTTGACTCAGTTCAACTG | 3644 | 2909 | 2000 | 909 |
| 532 | TGVQTAV | 3645 | ACTGGAGTCCAAACCGCCGTC | 3646 | 2908 | 2908 | 0 |
| 533 | AADSTER | 3647 | GCGGCGGATAGTACTGAGCGG | 3648 | 2908 | 2000 | 908 |
| 534 | GEAGKYS | 3649 | GGGGAGGCTGGGAAGTATTCT | 3650 | 2906 | 2906 | 0 |
| 535 | AGGGSPR | 3651 | GCCGGAGGCGGATCGCCTCGT | 3652 | 2903 | 2000 | 903 |
| 536 | GEAGTNS | 3653 | GGTGAAGCCGGCACAAACTCG | 3654 | 2902 | 2000 | 902 |
| 537 | RVDSSQI | 3655 | AGGGTGGATTCGTCGCAGATT | 3656 | 2902 | 0 | 2902 |
| 538 | YTAGSMA | 3657 | TACACTGCTGGCAGCATGGCC | 3658 | 2901 | 2000 | 901 |
| 539 | MLGAGVS | 3659 | ATGTTGGGTGCTGGGGTGTCG | 3660 | 2901 | 1879 | 1022 |
| 540 | QADNNGR | 3661 | CAGGCGGATAATAATGGTAGG | 3662 | 2900 | 2000 | 900 |
| 541 | TLHDKVL | 3663 | ACCTTGCACGACAAAGTCTTA | 3664 | 2899 | 2000 | 899 |
| 542 | VTKTLPQ | 3665 | GTGACCAAAACTTTGCCGCAA | 3666 | 2899 | 0 | 2899 |
| 543 | QSLTDRV | 3667 | CAGAGTTTGACTGATCGGGTT | 3668 | 2897 | 1290 | 1607 |
| 544 | ANRNESD | 3669 | GCTAATCGTAATGAGAGTGAT | 3670 | 2892 | 0 | 2892 |
| 545 | TSHDTLV | 3671 | ACGTCGCATGATACGTTGGTT | 3672 | 2886 | 2886 | 0 |
| 546 | SEGLTRY | 3673 | TCTGAAGGCCTCACCAGGTAC | 3674 | 2884 | 2884 | 0 |
| 547 | SHGADSK | 3675 | TCACACGGGGCCGACAGCAAA | 3676 | 2879 | 2615 | 263 |
| 548 | VLASTGH | 3677 | GTCTTGGCGAGCACCGGGCAC | 3678 | 2878 | 2000 | 878 |
| 549 | NHLSDRL | 3679 | AATCATCTTAGTGATCGTTTG | 3680 | 2874 | 2874 | 0 |
| 550 | MGRTDGL | 3681 | ATGGGAAGGACGGACGGATTA | 3682 | 2872 | 927 | 1945 |
| 551 | VSTERGT | 3683 | GTGAGTACTGAGCGGGGGACT | 3684 | 2871 | 2432 | 439 |
| 552 | SGHKAGV | 3685 | AGTGGTCACAAAGCAGGGGTG | 3686 | 2867 | 2000 | 867 |
| 553 | TSAEYNL | 3687 | ACGAGTGCGGAGTATAATTTG | 3688 | 2864 | 2000 | 864 |
| 554 | RSSETVA | 3689 | CGTTCATCTGAAACCGTGGCA | 3690 | 2864 | 2000 | 864 |
| 555 | NALSVKT | 3691 | AATGCGCTGTCTGTGAAGACT | 3692 | 2860 | 2860 | 0 |
| 556 | KTEQVQP | 3693 | AAGACGGAGCAGGTGCAGCCG | 3694 | 2860 | 2000 | 860 |
| 557 | RTLHDDT | 3695 | AGAACACTACACGACGACACG | 3696 | 2859 | 2000 | 859 |
| 558 | QSVSYLK | 3697 | CAGAGTGTGTCGTATCTGAAG | 3698 | 2859 | 2000 | 859 |
| 559 | ASGSAVA | 3699 | GCTTCTGGGTCGGCGGTGGCT | 3700 | 2857 | 2000 | 857 |
| 560 | MVTQQLK | 3701 | ATGGTGACGCAGCAGTTGAAG | 3702 | 2856 | 0 | 2856 |
| 561 | KNSGVDP | 3703 | AAAAACTCTGGCGTCGACCCA | 3704 | 2854 | 2854 | 0 |
| 562 | GGPAEGR | 3705 | GGAGGGCCAGCCGAAGGAAGG | 3706 | 2854 | 2000 | 854 |
| 563 | VKTSDRT | 3707 | GTTAAGACGTCGGATAGGACG | 3708 | 2853 | 2000 | 853 |
| 564 | NGVTLQV | 3709 | AACGGGGTAACCCTACAAGTA | 3710 | 2853 | 853 | 2000 |
| 565 | LSVSQSA | 3711 | CTGAGTGTTTCTCAGTCGGCG | 3712 | 2853 | 0 | 2853 |
| 566 | TRLQEGT | 3713 | ACACGTCTCCAAGAAGGCACC | 3714 | 2848 | 2000 | 848 |
| 567 | LSRGEEI | 3715 | CTTTCGAGGGGTGAGGAGATT | 3716 | 2847 | 0 | 2847 |
| 568 | SLGNSDH | 3717 | TCGTTGGGGAATTCGGATCAT | 3718 | 2843 | 2000 | 843 |
| 569 | LAGVAQA | 3719 | CTAGCTGGCGTGGCTCAAGCT | 3720 | 2839 | 2839 | 0 |
| 570 | NGQTGKH | 3721 | AATGGGCAGACGGGGAAGCAT | 3722 | 2838 | 4 | 2834 |
| 571 | VVTLGRQ | 3723 | GTGGTTACTCTGGGTCGTCAG | 3724 | 2836 | 2000 | 836 |
| 572 | LNADTDR | 3725 | CTAAACGCAGACACTGACCGG | 3726 | 2833 | 2000 | 833 |
| 573 | ASRLPQT | 3727 | GCGTCTCGGCTTCCTCAGACT | 3728 | 2831 | 0 | 2831 |
| 574 | LTPGSQL | 3729 | CTGACTCCGGGGTCGCAGCTG | 3730 | 2830 | 1828 | 1002 |
| 575 | KSSDTPM | 3731 | AAGAGTTCTGATACTCCTATG | 3732 | 2829 | 2000 | 829 |
| 576 | QIQSRSD | 3733 | CAGATTCAGTCTCGTTCTGAT | 3734 | 2828 | 2000 | 828 |
| 577 | NEIRVSV | 3735 | AATGAGATTCGTGTGTCGGTT | 3736 | 2828 | 0 | 2828 |
| 578 | LQSGVLT | 3737 | CTTCAGTCGGGTGTTCTGACT | 3738 | 2828 | 0 | 2828 |
| 579 | LSANVRN | 3739 | CTATCTGCCAACGTACGTAAC | 3740 | 2826 | 2826 | 0 |
| 580 | ASVSSPH | 3741 | GCATCGGTCAGCTCCCCACAC | 3742 | 2826 | 2000 | 826 |
| 581 | GGTINGH | 3743 | GGGGGTACGATTAATGGTCAT | 3744 | 2826 | 1789 | 1037 |
| 582 | SLAGGTP | 3745 | AGCTTAGCAGGCGGCACGCCG | 3746 | 2822 | 2000 | 822 |
| 583 | IGASVTL | 3747 | ATTGGGGCTAGTGTTACGCTT | 3748 | 2821 | 2000 | 821 |
| 584 | GYGSGEA | 3749 | GGTTATGGGTCGGGGGAGGCT | 3750 | 2820 | 2000 | 820 |
| 585 | MQKEGSP | 3751 | ATGCAGAAGGAGGGGTCGCCG | 3752 | 2817 | 2000 | 817 |
| 586 | LSANLRT | 3753 | TTATCTGCAAACCTCAGAACG | 3754 | 2814 | 2000 | 814 |
| 587 | LSANVRT | 3755 | CTCTCTGCAAACGTACGTACA | 3756 | 2813 | 853 | 1960 |
| 588 | ASLLPQP | 3757 | GCGTCTCTGCTTCCTCAGCCT | 3758 | 2813 | 0 | 2813 |
| 589 | GTGEIGM | 3759 | GGGACTGGTGAGATTGGTATG | 3760 | 2812 | 2000 | 812 |
| 590 | LGHKPGV | 3761 | CTAGGTCACAAACCAGGGGTG | 3762 | 2811 | 2000 | 811 |
| 591 | LNLTDGV | 3763 | CTGAATTTGACTGATGGGGTT | 3764 | 2810 | 2810 | 0 |
| 592 | SEVSKGM | 3765 | AGTGAGGTTAGTAAGGGTATG | 3766 | 2810 | 2000 | 810 |
| 593 | QSLTHGV | 3767 | CAGAGTTTGACTCATGGGGTT | 3768 | 2805 | 2003 | 802 |
| 594 | VVQVPAR | 3769 | GTTGTTCAGGTTCCTGCGCGT | 3770 | 2805 | 805 | 2000 |
| 595 | MNGGHAL | 3771 | ATGAATGGGGGTCATGCTCTG | 3772 | 2804 | 2000 | 804 |
| 596 | GTLTLAY | 3773 | GGAACTCTCACGCTGGCCTAC | 3774 | 2804 | 0 | 2804 |
| 597 | GAATSQI | 3775 | GGGGCAGCAACAAGCCAAATC | 3776 | 2803 | 2000 | 803 |
| 598 | PTQGSLR | 3777 | CCGACACAAGGATCTCTACGT | 3778 | 2803 | 2000 | 803 |
| 599 | VAGSSIL | 3779 | GTCGCCGGGAGTAGCATATTG | 3780 | 2803 | 2000 | 803 |
| 600 | MLGGGMS | 3781 | ATGTTGGGTGGTGGGATGTCG | 3782 | 2802 | 2000 | 802 |
| 601 | GVAGTFS | 3783 | GGGGTGGCTGGGACGTTTTCT | 3784 | 2801 | 2000 | 801 |
| 602 | TIGHSQV | 3785 | ACCATCGGACACTCACAAGTC | 3786 | 2799 | 2000 | 799 |
| 603 | QSQKDVG | 3787 | CAATCGCAAAAAGACGTAGGA | 3788 | 2798 | 1847 | 951 |
| 604 | GGTNSGH | 3789 | GGGGGTACGAATAGTGGTCAT | 3790 | 2797 | 2000 | 797 |
| 605 | GGVSSTK | 3791 | GGTGGTGTTTCTTCGACTAAG | 3792 | 2797 | 192 | 2605 |
| 606 | QVRDNNT | 3793 | CAGGTGCGTGATAATAATACT | 3794 | 2795 | 2000 | 795 |
| 607 | AGGGVPR | 3795 | GCGGGGGGTGGGGTTCCGAGG | 3796 | 2793 | 2500 | 293 |
| 608 | ASVSSPP | 3797 | GCGTCGGTAAGTAGTCCCCCG | 3798 | 2793 | 2000 | 793 |
| 609 | MNGSHVL | 3799 | ATGAATGGGAGTCATGTTCTG | 3800 | 2792 | 2000 | 792 |
| 610 | VQHSQDN | 3801 | GTGCAGCATTCGCAGGATAAT | 3802 | 2792 | 2000 | 792 |
| 611 | KGASDTL | 3803 | AAAGGCGCGTCTGACACCCTC | 3804 | 2788 | 788 | 2000 |
| 612 | SMATGVK | 3805 | TCGATGGCGACGGGTGTTAAG | 3806 | 2788 | 0 | 2788 |
| 613 | SVGSGLL | 3807 | TCGGTGGGGAGCGGTTTGCTC | 3808 | 2787 | 2000 | 787 |
| 614 | GAGSGVA | 3809 | GGTGCTGGGTCGGGGGTGGCT | 3810 | 2786 | 786 | 2000 |
| 615 | MGSGERL | 3811 | ATGGGGTCTGGGGAGCGGTTG | 3812 | 2785 | 2000 | 785 |
| 616 | TGNDVRR | 3813 | ACCGGCAACGACGTAAGACGC | 3814 | 2785 | 1797 | 988 |
| 617 | PNSGKDY | 3815 | CCCAACTCAGGCAAAGACTAC | 3816 | 2783 | 1759 | 1024 |
| 618 | LNSSTLR | 3817 | CTCAACAGTTCTACACTCAGG | 3818 | 2779 | 0 | 2779 |
| 619 | LGHKAGH | 3819 | TTGGGGCATAAGGCTGGTCAT | 3820 | 2776 | 2776 | 0 |
| 620 | LADSKDR | 3821 | TTGGCTGATAGTAAGGATCGG | 3822 | 2774 | 0 | 2774 |
| 621 | LENQSLG | 3823 | CTGGAGAATCAGAGTCTTGGT | 3824 | 2771 | 0 | 2771 |
| 622 | QYVVSGV | 3825 | CAATACGTCGTCTCTGGCGTT | 3826 | 2769 | 2000 | 769 |
| 623 | MNGGRVL | 3827 | ATGAATGGGGGTCGTGTTCTG | 3828 | 2767 | 0 | 2767 |
| 624 | LSLTAGV | 3829 | CTGAGTTTGACTGCTGGGGTT | 3830 | 2764 | 0 | 2764 |
| 625 | FGIASGA | 3831 | TTTGGTATTGCTAGTGGGGCG | 3832 | 2763 | 763 | 2000 |
| 626 | EGGYSGA | 3833 | GAAGGGGGGTACTCAGGCGCG | 3834 | 2763 | 0 | 2763 |
| 627 | VTLGATS | 3835 | GTAACACTCGGAGCGACCAGC | 3836 | 2757 | 0 | 2757 |
| 628 | TGLQVGI | 3837 | ACTGGGCTGCAGGTTGGTATT | 3838 | 2756 | 2756 | 0 |
| 629 | IYPQSST | 3839 | ATATACCCGCAAAGCTCGACA | 3840 | 2756 | 0 | 2756 |
| 630 | NANSLME | 3841 | AATGCGAATTCTTTGATGGAG | 3842 | 2755 | 0 | 2755 |
| 631 | LHDGNTR | 3843 | TTGCATGATGGGAATACGCGG | 3844 | 2755 | 0 | 2755 |
| 632 | GYGSGLA | 3845 | GGTTATGGGTCGGGGCTGGCT | 3846 | 2755 | 0 | 2755 |
| 633 | TIGHSQV | 3847 | ACGATTGGTCATAGTCAGGTT | 3848 | 2754 | 2630 | 124 |
| 634 | VANSGLA | 3849 | GTGGCGAATTCTGGGCTGGCT | 3850 | 2754 | 2000 | 754 |
| 635 | AGLLNAL | 3851 | GCGGGGTTGCTGAATGCTTTG | 3852 | 2754 | 2000 | 754 |
| 636 | KNAGHVL | 3853 | AAGAATGCGGGTCATGTTCTG | 3854 | 2752 | 2000 | 752 |
| 637 | PMSNTHP | 3855 | CCGATGTCGAATACTCATCCG | 3856 | 2749 | 2749 | 0 |
| 638 | LAGSLPL | 3857 | CTTGCTGGTTCGCTTCCGTTG | 3858 | 2749 | 2000 | 749 |
| 639 | SRLENIS | 3859 | AGTAGGTTGGAGAATATTAGT | 3860 | 2748 | 0 | 2748 |
| 640 | HSEGVGR | 3861 | CATAGTGAGGGTGTTGGGCGG | 3862 | 2744 | 0 | 2744 |
| 641 | GAPINSF | 3863 | GGAGCACCAATAAACTCTTTC | 3864 | 2742 | 2000 | 742 |
| 642 | GLEPRVP | 3865 | GGGCTGGAGCCTCGTGTTCCT | 3866 | 2738 | 0 | 2738 |
| 643 | PAREGNF | 3867 | CCTGCCAGGGAAGGCAACTTC | 3868 | 2736 | 2000 | 736 |
| 644 | AAGGQVL | 3869 | GCTGCTGGGGGACAAGTCCTC | 3870 | 2735 | 2735 | 0 |
| 645 | TSYDKLV | 3871 | ACGTCGTATGATAAGTTGGTT | 3872 | 2734 | 1995 | 739 |
| 646 | ELNAVAR | 3873 | GAACTTAACGCAGTTGCTCGG | 3874 | 2733 | 2000 | 733 |
| 647 | SLRHVEV | 3875 | AGCCTACGCCACGTTGAAGTC | 3876 | 2725 | 2000 | 725 |
| 648 | AADSSGR | 3877 | GCGGCGGATAGTTCTGGGCGG | 3878 | 2724 | 2000 | 724 |
| 649 | ANEVKHV | 3879 | GCGAATGAGGTTAAGCATGTG | 3880 | 2724 | 2000 | 724 |
| 650 | DLAQSGR | 3881 | GATTTGGCTCAGAGTGGGCGT | 3882 | 2723 | 2000 | 723 |
| 651 | GLAGTNT | 3883 | GGGCTGGCTGGGACGAATACT | 3884 | 2722 | 2002 | 720 |
| 652 | SPSIGPV | 3885 | TCGCCTTCTATTGGTCCTGTG | 3886 | 2721 | 721 | 2000 |
| 653 | SVAGLSR | 3887 | TCTGTTGCTGGTCTTTCTAGG | 3888 | 2721 | 0 | 2721 |
| 654 | ADVHVKV | 3889 | GCGGATGTTCATGTGAAGGTG | 3890 | 2720 | 2720 | 0 |
| 655 | IVKQGDI | 3891 | ATTGTTAAGCAGGGTGATATT | 3892 | 2720 | 2720 | 0 |
| 656 | ASASGVA | 3893 | GCTTCTGCGTCGGGGGTGGCT | 3894 | 2719 | 0 | 2719 |
| 657 | MGGGNIP | 3895 | ATGGGAGGTGGCAACATACCC | 3896 | 2717 | 0 | 2717 |
| 658 | TPTSSTR | 3897 | ACACCAACATCCAGCACACGA | 3898 | 2716 | 2000 | 716 |
| 659 | VAEKAMA | 3899 | GTAGCTGAAAAAGCTATGGCA | 3900 | 2716 | 0 | 2716 |
| 660 | GSGSGAA | 3901 | GGTTCTGGGTCGGGGGCGGCT | 3902 | 2715 | 2000 | 715 |
| 661 | NMQDGGM | 3903 | AACATGCAAGACGGCGGCATG | 3904 | 2714 | 1356 | 1358 |
| 662 | QLRDNKT | 3905 | CAATTACGCGACAACAAAACG | 3906 | 2713 | 2000 | 713 |
| 663 | HAGLGVI | 3907 | CATGCTGGTCTTGGTGTTATT | 3908 | 2713 | 0 | 2713 |
| 664 | VNVSYRA | 3909 | GTGAATGTTTCGTATCGTGCT | 3910 | 2712 | 1101 | 1611 |
| 665 | IRNDKGP | 3911 | ATCCGAAACGACAAAGGGCCT | 3912 | 2711 | 2711 | 0 |
| 666 | ASLAQAV | 3913 | GCTAGTCTTGCACAAGCAGTT | 3914 | 2710 | 2000 | 710 |
| 667 | TLSHAEL | 3915 | ACGTTGTCTCATGCTGAGCTG | 3916 | 2710 | 2000 | 710 |
| 668 | TYSDGST | 3917 | ACCTACTCTGACGGTTCTACC | 3918 | 2710 | 0 | 2710 |
| 669 | REKGVTV | 3919 | AGAGAAAAAGGGGTCACGGTC | 3920 | 2709 | 2000 | 709 |
| 670 | ENRVYSP | 3921 | GAGAATCGTGTTTATTCTCCG | 3922 | 2707 | 0 | 2707 |
| 671 | ATQGTLR | 3923 | GCTACTCAGGGGACGCTTCGG | 3924 | 2706 | 2000 | 706 |
| 672 | KHVDTGA | 3925 | AAGCATGTGGATACGGGGGCG | 3926 | 2704 | 0 | 2704 |
| 673 | LANKMSD | 3927 | CTGGCTAATAAGATGAGTGAT | 3928 | 2701 | 701 | 2000 |
| 674 | TLVGVVS | 3929 | ACCCTCGTGGGGGTAGTCTCT | 3930 | 2699 | 0 | 2699 |
| 675 | GVPGTNS | 3931 | GGTGTTCCCGGTACTAACTCC | 3932 | 2696 | 2000 | 696 |
| 676 | RTDGADL | 3933 | CGTACGGATGGTGCGGATCTT | 3934 | 2696 | 0 | 2696 |
| 677 | PTQGTLL | 3935 | CCGACACAAGGAACTTTGTTG | 3936 | 2691 | 2000 | 691 |
| 678 | SHASDTK | 3937 | TCTCATGCTTCTGATACGAAG | 3938 | 2690 | 2690 | 0 |
| 679 | AVVSAGP | 3939 | GCGGTGGTGTCTGCTGGGCCG | 3940 | 2687 | 2000 | 687 |
| 680 | HNPQSLG | 3941 | CACAACCCTCAATCTCTCGGT | 3942 | 2686 | 0 | 2686 |
| 681 | TSLGIML | 3943 | ACCAGCCTAGGAATAATGCTT | 3944 | 2683 | 0 | 2683 |
| 682 | RPQGSES | 3945 | CGTCCTCAGGGTAGTGAGAGT | 3946 | 2682 | 1880 | 802 |
| 683 | AVNNVTL | 3947 | GCTGTGAATAATGTTACTCTT | 3948 | 2680 | 2680 | 0 |
| 684 | NGSAGNR | 3949 | AACGGTAGCGCTGGGAACCGC | 3950 | 2679 | 2679 | 0 |
| 685 | VFGETRA | 3951 | GTTTTTGGTGAGACGCGTGCG | 3952 | 2676 | 2000 | 676 |
| 686 | ASESSPS | 3953 | GCATCGGAATCAAGCCCATCT | 3954 | 2675 | 0 | 2675 |
| 687 | NSVGASI | 3955 | AACAGTGTAGGAGCGTCAATC | 3956 | 2674 | 0 | 2674 |
| 688 | DAGNQMG | 3957 | GATGCGGGGAATCAGATGGGG | 3958 | 2672 | 2672 | 0 |
| 689 | GSGRDGL | 3959 | GGTAGTGGAAGAGACGGACTG | 3960 | 2671 | 0 | 2671 |
| 690 | STVTGGP | 3961 | AGTACTGTTACTGGGGGTCCG | 3962 | 2671 | 0 | 2671 |
| 691 | TSYDKMV | 3963 | ACGTCGTATGATAAGATGGTT | 3964 | 2670 | 2345 | 325 |
| 692 | SGANLSN | 3965 | TCTGGTGCGAATTTGTCTAAT | 3966 | 2668 | 2009 | 659 |
| 693 | VKSTEGT | 3967 | GTTAAATCCACGGAAGGAACA | 3968 | 2666 | 2666 | 0 |
| 694 | GKDGHQM | 3969 | GGGAAGGATGGTCATCAGATG | 3970 | 2666 | 0 | 2666 |
| 695 | LGQKAGV | 3971 | CTTGGCCAAAAAGCAGGAGTC | 3972 | 2663 | 2663 | 0 |
| 696 | REQQKIW | 3973 | AGAGAACAACAAAAAATATGG | 3974 | 2663 | 2000 | 663 |
| 697 | AGNLSVK | 3975 | GCGGGGAATCTGAGTGTGAAG | 3976 | 2661 | 2661 | 0 |
| 698 | SHSLIEV | 3977 | TCTCATAGTCTGATTGAGGTG | 3978 | 2661 | 0 | 2661 |
| 699 | HVSGASL | 3979 | CATGTTTCGGGTGCTTCTCTT | 3980 | 2659 | 0 | 2659 |
| 700 | LNLKGVV | 3981 | TTGAATCTGAAGGGTGTGGTT | 3982 | 2657 | 2005 | 653 |
| 701 | AHEARGD | 3983 | GCGCACGAAGCACGAGGGGAC | 3984 | 2657 | 1883 | 774 |
| 702 | HANTAGV | 3985 | CATGCGAATACTGCTGGGGTG | 3986 | 2656 | 0 | 2656 |
| 703 | TGAGGHP | 3987 | ACGGGTGCTGGTGGGCATCCT | 3988 | 2654 | 0 | 2654 |
| 704 | LSRGQEM | 3989 | CTGTCACGAGGGCAAGAAATG | 3990 | 2653 | 2000 | 653 |
| 705 | LSNHGHV | 3991 | CTGAGTAATCATGGGCATGTT | 3992 | 2652 | 2000 | 652 |
| 706 | STHHTST | 3993 | TCTACACACCACACCTCAACC | 3994 | 2651 | 2000 | 651 |
| 707 | QKISTVQ | 3995 | CAGAAGATTTCGACTGTGCAG | 3996 | 2651 | 1536 | 1115 |
| 708 | GVRNTNV | 3997 | GGAGTCCGGAACACAAACGTA | 3998 | 2648 | 2648 | 0 |
| 709 | LTVSLNK | 3999 | CTAACTGTATCTCTTAACAAA | 4000 | 2647 | 2000 | 647 |
| 710 | LSNNGPV | 4001 | CTCTCTAACAACGGCCCCGTG | 4002 | 2645 | 2000 | 645 |
| 711 | LNLKGVV | 4003 | CTTAACCTCAAAGGGGTCGTC | 4004 | 2645 | 1896 | 749 |
| 712 | PKPSHGE | 4005 | CCGAAGCCTAGTCATGGTGAG | 4006 | 2645 | 0 | 2645 |
| 713 | ETNRGSV | 4007 | GAAACAAACCGGGGATCCGTA | 4008 | 2644 | 2000 | 644 |
| 714 | NLTSDKV | 4009 | AATCTGACGTCTGATAAGGTT | 4010 | 2642 | 2000 | 642 |
| 715 | MEDRART | 4011 | ATGGAGGATAGGGCTCGGACT | 4012 | 2642 | 0 | 2642 |
| 716 | GVAGTNS | 4013 | GGGGTGGCTGGGACGAATTCT | 4014 | 2641 | 2010 | 631 |
| 717 | SLGQDKL | 4015 | AGTCTAGGCCAAGACAAATTG | 4016 | 2640 | 2640 | 0 |
| 718 | GVGEGRA | 4017 | GGCGTCGGGGAAGGACGAGCC | 4018 | 2640 | 2000 | 640 |
| 719 | ASLLPPT | 4019 | GCATCGCTCTTGCCCCCCACG | 4020 | 2639 | 0 | 2639 |
| 720 | TALVLHK | 4021 | ACGGCTCTTGTTCTTCATAAG | 4022 | 2638 | 0 | 2638 |
| 721 | AVSDHTV | 4023 | GCTGTTAGTGATCATACTGTG | 4024 | 2637 | 2637 | 0 |
| 722 | SQSAIPN | 4025 | AGTCAGTCGGCTATTCCTAAT | 4026 | 2636 | 0 | 2636 |
| 723 | MNGGHLQ | 4027 | ATGAATGGGGGTCATCTTCAG | 4028 | 2635 | 2635 | 0 |
| 724 | KNGGNVL | 4029 | AAAAACGGTGGAAACGTGTTG | 4030 | 2635 | 2000 | 635 |
| 725 | GAVSSTT | 4031 | GGTGCTGTTTCTTCGACTACG | 4032 | 2633 | 2000 | 633 |
| 726 | STLNTST | 4033 | AGTACTCTTAATACTTCGACT | 4034 | 2631 | 2000 | 631 |
| 727 | RSPNVGQ | 4035 | AGGTCGCCTAATGTTGGGCAG | 4036 | 2630 | 2000 | 630 |
| 728 | PTQGTFR | 4037 | CCTACTCAGGGGACGTTTCGG | 4038 | 2630 | 1831 | 799 |
| 729 | NHGSDSK | 4039 | AACCACGGGTCAGACAGCAAA | 4040 | 2628 | 2000 | 628 |
| 730 | LPSGHLH | 4041 | CTTCCGAGTGGTCATCTTCAT | 4042 | 2628 | 2000 | 628 |
| 731 | SEKVVAT | 4043 | TCGGAGAAGGTGGTGGCGACG | 4044 | 2625 | 2000 | 625 |
| 732 | TVPNTVL | 4045 | ACCGTTCCCAACACAGTCCTG | 4046 | 2625 | 0 | 2625 |
| 733 | LSIGQGH | 4047 | CTATCCATAGGACAAGGACAC | 4048 | 2625 | 0 | 2625 |
| 734 | TSVLSQV | 4049 | ACGAGTGTTCTTTCGCAGGTT | 4050 | 2624 | 2000 | 624 |
| 735 | VLSSHGP | 4051 | GTCTTATCGTCACACGGCCCA | 4052 | 2624 | 0 | 2624 |
| 736 | TSQASSV | 4053 | ACGTCGCAGGCTTCGTCTGTG | 4054 | 2623 | 2000 | 623 |
| 737 | NRSAGDR | 4055 | AACCGTTCGGCTGGCGACCGA | 4056 | 2622 | 2000 | 622 |
| 738 | RGGVTTQ | 4057 | CGAGGAGGAGTAACAACACAA | 4058 | 2622 | 2000 | 622 |
| 739 | SGLKGVN | 4059 | TCCGGACTAAAAGGTGTTAAC | 4060 | 2622 | 0 | 2622 |
| 740 | STITNLM | 4061 | AGTACTATTACTAATCTGATG | 4062 | 2619 | 1884 | 735 |
| 741 | KGASVTL | 4063 | AAGGGGGCTAGTGTTACGCTT | 4064 | 2618 | 2618 | 0 |
| 742 | TSTHEGV | 4065 | ACTTCAACGCACGAAGGAGTT | 4066 | 2618 | 2000 | 618 |
| 743 | KLGGGVS | 4067 | AAGTTGGGTGGTGGGGTGTCG | 4068 | 2618 | 2000 | 618 |
| 744 | GLESRVP | 4069 | GGTTTAGAATCAAGAGTGCCC | 4070 | 2616 | 2616 | 0 |
| 745 | QSLSDGV | 4071 | CAATCATTAAGCGACGGCGTC | 4072 | 2614 | 2614 | 0 |
| 746 | ADAAHAL | 4073 | GCGGACGCCGCCCACGCGCTT | 4074 | 2613 | 0 | 2613 |
| 747 | CAGGCEL | 4075 | TGTGCGGGTGGTTGTGAGCTT | 4076 | 2612 | 2000 | 612 |
| 748 | PGERNNP | 4077 | CCAGGAGAACGTAACAACCCC | 4078 | 2612 | 1929 | 683 |
| 749 | GVRNTDI | 4079 | GGAGTTCGGAACACAGACATC | 4080 | 2612 | 0 | 2612 |
| 750 | STLHTSI | 4081 | AGTACTCTTCATACTTCGATT | 4082 | 2611 | 0 | 2611 |
| 751 | AEVGSNR | 4083 | GCAGAAGTTGGCTCAAACAGG | 4084 | 2610 | 0 | 2610 |
| 752 | NDRNTSS | 4085 | AACGACCGAAACACATCAAGT | 4086 | 2608 | 2000 | 608 |
| 753 | GPVSSTK | 4087 | GGTCCTGTTTCTTCGACTAAG | 4088 | 2608 | 2000 | 608 |
| 754 | VHGTGGA | 4089 | GTGCATGGTACTGGGGGTGCT | 4090 | 2608 | 1488 | 1120 |
| 755 | VLASSGP | 4091 | GTATTGGCAAGTTCGGGCCCA | 4092 | 2608 | 0 | 2608 |
| 756 | LAGSISL | 4093 | CTTGCTGGGTCGATTTCGTTG | 4094 | 2604 | 2000 | 604 |
| 757 | SRTLEET | 4095 | TCTAGGACGCTTGAGGAGACT | 4096 | 2604 | 2000 | 604 |
| 758 | KEIRVSV | 4097 | AAGGAGATTCGTGTGTCGGTT | 4098 | 2601 | 2000 | 601 |
| 759 | HAVAGAT | 4099 | CATGCTGTGGCTGGGGCGACT | 4100 | 2597 | 2000 | 597 |
| 760 | VDHGGVN | 4101 | GTAGACCACGGCGGGGTTAAC | 4102 | 2595 | 595 | 2000 |
| 761 | TTATIVR | 4103 | ACCACTGCTACGATCGTACGC | 4104 | 2594 | 594 | 2000 |
| 762 | SGEGLAS | 4105 | TCGGGTGAGGGGCTGGCTAGT | 4106 | 2593 | 2000 | 593 |
| 763 | TVGLTIA | 4107 | ACCGTAGGCCTTACTATAGCA | 4108 | 2592 | 1729 | 863 |
| 764 | DYDSGRR | 4109 | GACTACGACTCTGGACGTAGA | 4110 | 2589 | 0 | 2589 |
| 765 | QGVTVGL | 4111 | CAGGGGGTTACGGTTGGGCTT | 4112 | 2589 | 0 | 2589 |
| 766 | KSQSENS | 4113 | AAGTCGCAGTCGGAGAATAGT | 4114 | 2587 | 2587 | 0 |
| 767 | SEGLSRD | 4115 | TCCGAAGGGCTGTCCAGAGAC | 4116 | 2587 | 2000 | 587 |
| 768 | SGDGTSK | 4117 | TCGGGTGATGGGACTTCTAAG | 4118 | 2586 | 2000 | 586 |
| 769 | DGSAGDR | 4119 | GATGGGAGTGCGGGTGATCGT | 4120 | 2586 | 2000 | 586 |
| 770 | TDALTSK | 4121 | ACGGACGCACTCACAAGCAAA | 4122 | 2583 | 2000 | 583 |
| 771 | QSQTTVG | 4123 | CAGTCTCAGACGACTGTTGGT | 4124 | 2583 | 1923 | 660 |
| 772 | GSASAVA | 4125 | GGCAGCGCTTCAGCAGTAGCA | 4126 | 2583 | 0 | 2583 |
| 773 | VTVTMSR | 4127 | GTCACGGTAACCATGTCACGG | 4128 | 2581 | 0 | 2581 |
| 774 | GVGNTNI | 4129 | GGCGTAGGTAACACGAACATA | 4130 | 2579 | 2000 | 579 |
| 775 | TIAHSQV | 4131 | ACGATTGCTCATAGTCAGGTT | 4132 | 2579 | 0 | 2579 |
| 776 | VQGTQTG | 4133 | GTGCAGGGTACGCAGACTGGT | 4134 | 2578 | 2000 | 578 |
| 777 | LRVTEIL | 4135 | CTTCGAGTCACTGAAATACTA | 4136 | 2578 | 0 | 2578 |
| 778 | SSSGLVR | 4137 | AGTTCCTCTGGGCTAGTCCGA | 4138 | 2577 | 0 | 2577 |
| 779 | LSLSKDK | 4139 | CTATCGTTATCTAAAGACAAA | 4140 | 2574 | 0 | 2574 |
| 780 | TGISVNG | 4141 | ACCGGCATCTCTGTCAACGGT | 4142 | 2573 | 2000 | 573 |
| 781 | SKSAFPN | 4143 | TCGAAATCCGCCTTCCCAAAC | 4144 | 2571 | 2571 | 0 |
| 782 | VGNSSGV | 4145 | GTTGGTAATTCTTCGGGTGTG | 4146 | 2571 | 2000 | 571 |
| 783 | DSHVSGD | 4147 | GACTCACACGTCTCCGGCGAC | 4148 | 2569 | 1477 | 1092 |
| 784 | KVYDTPM | 4149 | AAGGTTTATGATACTCCTATG | 4150 | 2568 | 2000 | 568 |
| 785 | GSMENVR | 4151 | GGGAGTATGGAGAATGTGCGT | 4152 | 2567 | 2000 | 567 |
| 786 | ETTQGSP | 4153 | GAAACAACGCAAGGCAGTCCC | 4154 | 2565 | 2000 | 565 |
| 787 | KGSGLEI | 4155 | AAGGGGTCTGGGCTTGAGATT | 4156 | 2561 | 0 | 2561 |
| 788 | TALQVSI | 4157 | ACTGCGCTGCAGGTTAGTATT | 4158 | 2560 | 1976 | 584 |
| 789 | PTQSDLA | 4159 | CCTACGCAGTCGGATCTTGCT | 4160 | 2558 | 2000 | 558 |
| 790 | STQTLGE | 4161 | TCGACTCAGACTTTGGGGGAG | 4162 | 2558 | 1869 | 690 |
| 791 | LSNRGPV | 4163 | CTTTCTAACAGAGGCCCGGTG | 4164 | 2556 | 0 | 2556 |
| 792 | EHVNVKV | 4165 | GAGCATGTTAATGTGAAGGTG | 4166 | 2555 | 2000 | 555 |
| 793 | PLKGGGE | 4167 | CCTCTGAAGGGTGGTGGGGAG | 4168 | 2554 | 1776 | 778 |
| 794 | SHGSVSK | 4169 | TCTCATGGTTCTGTTTCGAAG | 4170 | 2552 | 0 | 2552 |
| 795 | MLGGGVS | 4171 | ATGTTGGGTGGTGGGGTGTCG | 4172 | 2549 | 1365 | 1184 |
| 796 | TAVHSTS | 4173 | ACTGCCGTACACAGCACGTCA | 4174 | 2548 | 2000 | 548 |
| 797 | QADSHGR | 4175 | CAAGCAGACAGCCACGGCCGT | 4176 | 2548 | 1815 | 733 |
| 798 | ATLKPDY | 4177 | GCAACGTTGAAACCCGACTAC | 4178 | 2548 | 0 | 2548 |
| 799 | LDTSARV | 4179 | CTTGATACTAGTGCTCGTGTT | 4180 | 2547 | 0 | 2547 |
| 800 | HTSGTSS | 4181 | CATACGAGTGGGACGTCGTCG | 4182 | 2544 | 2000 | 544 |
| 801 | TGARDQY | 4183 | ACAGGGGCGCGTGACCAATAC | 4184 | 2544 | 1585 | 959 |
| 802 | SGETLRL | 4185 | TCTGGGGAGACGCTTAGGCTT | 4186 | 2544 | 1566 | 978 |
| 803 | VSLSDGV | 4187 | GTAAGCCTTTCGGACGGTGTG | 4188 | 2542 | 2000 | 542 |
| 804 | AGVVNAL | 4189 | GCGGGGGTGGTGAATGCTTTG | 4190 | 2541 | 2231 | 310 |
| 805 | DASKLVN | 4191 | GATGCGAGTAAGCTTGTGAAT | 4192 | 2539 | 2000 | 539 |
| 806 | EIRLSTH | 4193 | GAAATAAGACTGTCCACCCAC | 4194 | 2539 | 2000 | 539 |
| 807 | MGRTDGL | 4195 | ATGGGGCGTACTGATGGGTTG | 4196 | 2536 | 1507 | 1029 |
| 808 | TGLLVSI | 4197 | ACTGGGCTGCTGGTTAGTATT | 4198 | 2536 | 0 | 2536 |
| 809 | KAGLLFD | 4199 | AAAGCAGGCCTTCTATTCGAC | 4200 | 2532 | 2000 | 532 |
| 810 | SRAEGIK | 4201 | AGTCGTGCGGAGGGGATTAAG | 4202 | 2532 | 2000 | 532 |
| 811 | NGKVDRD | 4203 | AATGGGAAGGTTGATCGGGAT | 4204 | 2530 | 2000 | 530 |
| 812 | SPPSSPR | 4205 | TCTCCGCCGAGTTCGCCGCGT | 4206 | 2530 | 1806 | 724 |
| 813 | NGIAGDR | 4207 | AATGGGATTGCGGGTGATCGT | 4208 | 2527 | 2000 | 527 |
| 814 | NRASDGI | 4209 | AACCGAGCTTCTGACGGGATA | 4210 | 2524 | 2000 | 524 |
| 815 | GVELISR | 4211 | GGTGTTGAGCTGATTTCGCGG | 4212 | 2521 | 2000 | 521 |
| 816 | RVQLSET | 4213 | CGGGTGCAGCTGTCTGAGACT | 4214 | 2521 | 2000 | 521 |
| 817 | LNYSVSL | 4215 | TTAAACTACAGTGTAAGCCTC | 4216 | 2520 | 1067 | 1454 |
| 818 | ASVSSKS | 4217 | GCTAGTGTGTCTTCGAAGAGT | 4218 | 2519 | 2000 | 519 |
| 819 | TPSTGVL | 4219 | ACTCCTAGTACTGGGGTGCTG | 4220 | 2519 | 1899 | 620 |
| 820 | HANTAGV | 4221 | CACGCAAACACAGCAGGTGTA | 4222 | 2518 | 2000 | 518 |
| 821 | VVSVLNV | 4223 | GTGGTGAGTGTGCTGAATGTT | 4224 | 2518 | 2000 | 518 |
| 822 | AHDHVKV | 4225 | GCGCATGATCATGTGAAGGTG | 4226 | 2518 | 1558 | 960 |
| 823 | SSEGRNV | 4227 | TCGTCAGAAGGAAGAAACGTT | 4228 | 2517 | 2000 | 517 |
| 824 | NNNGATS | 4229 | AATAATAATGGTGCGACTTCT | 4230 | 2516 | 1571 | 945 |
| 825 | LSQGSQQ | 4231 | CTGTCTCAGGGGTCGCAGCAG | 4232 | 2516 | 5 | 2511 |
| 826 | GGTTSGH | 4233 | GGCGGGACAACGAGCGGGCAC | 4234 | 2515 | 0 | 2515 |
| 827 | TLASQEL | 4235 | ACTCTGGCGTCGCAGGAGCTG | 4236 | 2514 | 2000 | 514 |
| 828 | ATGTESR | 4237 | GCGACTGGTACTGAGTCGCGG | 4238 | 2510 | 2000 | 510 |
| 829 | NNANLVI | 4239 | AATAATGCTAATCTGGTTATT | 4240 | 2510 | 2000 | 510 |
| 830 | STITTLK | 4241 | TCCACAATAACGACACTTAAA | 4242 | 2509 | 0 | 2509 |
| 831 | QLNSADS | 4243 | CAGCTGAATTCGGCTGATAGT | 4244 | 2507 | 1374 | 1133 |
| 832 | ETNFGVS | 4245 | GAGACTAATTTTGGGGTGTCT | 4246 | 2505 | 0 | 2505 |
| 833 | ENVHVKV | 4247 | GAAAACGTGCACGTTAAAGTC | 4248 | 2500 | 2000 | 500 |
| 834 | AGGGAPM | 4249 | GCCGGCGGAGGAGCACCCATG | 4250 | 2500 | 2000 | 500 |
| 835 | PNESVRA | 4251 | CCTAACGAAAGTGTACGGGCA | 4252 | 2498 | 1811 | 687 |
| 836 | LKPGLAD | 4253 | CTGAAGCCGGGGTTGGCGGAT | 4254 | 2498 | 0 | 2498 |
| 837 | LANRLSV | 4255 | CTGGCTAATAGGTTGAGTGTT | 4256 | 2497 | 1615 | 882 |
| 838 | FAGIAQA | 4257 | TTTGCGGGGATTGCGCAGGCG | 4258 | 2493 | 2000 | 493 |
| 839 | RVHSAQH | 4259 | CGTGTCCACAGTGCTCAACAC | 4260 | 2491 | 1933 | 558 |
| 840 | LSGLRSG | 4261 | TTGTCTGGTCTTCGTAGTGGT | 4262 | 2490 | 2000 | 490 |
| 841 | SEGLSRL | 4263 | TCCGAAGGATTATCCCGACTT | 4264 | 2490 | 2000 | 490 |
| 842 | RLLRDES | 4265 | AGGTTGCTACGAGACGAATCT | 4266 | 2490 | 0 | 2490 |
| 843 | SPSAIPN | 4267 | TCTCCCAGTGCGATACCGAAC | 4268 | 2488 | 0 | 2488 |
| 844 | VSRGAEL | 4269 | GTTTCGAGGGGTGCGGAGCTG | 4270 | 2488 | 0 | 2488 |
| 845 | KGSDTPM | 4271 | AAAGGATCGGACACACCGATG | 4272 | 2487 | 2000 | 487 |
| 846 | VDHGGVM | 4273 | GTGGATCATGGTGGTGTGATG | 4274 | 2487 | 2000 | 487 |
| 847 | VNAALGI | 4275 | GTTAATGCTGCGCTTGGGATT | 4276 | 2487 | 2000 | 487 |
| 848 | TMSMGKL | 4277 | ACGATGTCGATGGGGAAGCTG | 4278 | 2484 | 2000 | 484 |
| 849 | INGGHDL | 4279 | ATCAACGGAGGCCACGACCTC | 4280 | 2484 | 2000 | 484 |
| 850 | GTGSTIV | 4281 | GGGACGGGTTCTACGATTGTG | 4282 | 2484 | 2000 | 484 |
| 851 | TNGGHVL | 4283 | ACTAACGGCGGACACGTGCTC | 4284 | 2484 | 1444 | 1040 |
| 852 | LISSTMR | 4285 | TTGATTTCTAGTACGATGCGT | 4286 | 2484 | 1275 | 1209 |
| 853 | AGGNGSY | 4287 | GCAGGAGGAAACGGCTCCTAC | 4288 | 2483 | 1618 | 865 |
| 854 | ITQAAYV | 4289 | ATTACGCAGGCTGCTTATGTT | 4290 | 2482 | 2000 | 482 |
| 855 | AVLAGSM | 4291 | GCGGTTCTGGCGGGGTCTATG | 4292 | 2480 | 2000 | 480 |
| 856 | GASGAVL | 4293 | GGAGCTTCAGGGGCGGTCCTC | 4294 | 2480 | 0 | 2480 |
| 857 | PTATESL | 4295 | CCTACCGCTACAGAAAGTCTC | 4296 | 2480 | 0 | 2480 |
| 858 | SPQGGLP | 4297 | TCGCCGCAGGGGGGTCTTCCT | 4298 | 2477 | 2000 | 477 |
| 859 | VRASIVD | 4299 | GTGAGGGCTAGTATTGTTGAT | 4300 | 2477 | 2000 | 477 |
| 860 | AVKENET | 4301 | GCGGTGAAGGAGAATGAGACG | 4302 | 2477 | 2000 | 477 |
| 861 | HVSQDHS | 4303 | CATGTGTCTCAGGATCATTCG | 4304 | 2477 | 6 | 2471 |
| 862 | SKSNDSS | 4305 | AGTAAGTCTAATGATAGTTCT | 4306 | 2477 | 0 | 2477 |
| 863 | KTEQVQP | 4307 | AAAACAGAACAAGTCCAACCT | 4308 | 2476 | 0 | 2476 |
| 864 | MTGTAHQ | 4309 | ATGACGGGTACGGCTCATCAG | 4310 | 2475 | 1832 | 643 |
| 865 | IKQAVYV | 4311 | ATAAAACAAGCAGTCTACGTA | 4312 | 2474 | 2000 | 474 |
| 866 | IPSGGPR | 4313 | ATTCCGTCTGGGGGTCCGCGT | 4314 | 2474 | 2000 | 474 |
| 867 | TKPNMVS | 4315 | ACTAAGCCGAATATGGTGAGT | 4316 | 2472 | 2000 | 472 |
| 868 | NDRNTSS | 4317 | AATGATAGGAATACGTCTTCG | 4318 | 2471 | 2000 | 471 |
| 869 | TGISVGK | 4319 | ACCGGGATATCAGTAGGCAAA | 4320 | 2471 | 1429 | 1042 |
| 870 | SEQQKDW | 4321 | TCTGAACAACAAAAAGACTGG | 4322 | 2470 | 2000 | 470 |
| 871 | LLTSVKV | 4323 | CTACTAACGTCTGTTAAAGTA | 4324 | 2467 | 1938 | 529 |
| 872 | TTEKVTG | 4325 | ACGACTGAGAAGGTTACTGGT | 4326 | 2464 | 0 | 2464 |
| 873 | GALSTTK | 4327 | GGAGCGTTAAGTACAACCAAA | 4328 | 2463 | 2000 | 463 |
| 874 | RTLHDNT | 4329 | AGGACCCTCCACGACAACACA | 4330 | 2463 | 2000 | 463 |
| 875 | TREHNSI | 4331 | ACTAGGGAGCATAATTCGATT | 4332 | 2463 | 2000 | 463 |
| 876 | NHITGGV | 4333 | AACCACATAACAGGCGGGGTC | 4334 | 2463 | 1819 | 644 |
| 877 | SQAQAGY | 4335 | TCTCAGGCGCAGGCGGGTTAT | 4336 | 2462 | 2000 | 462 |
| 878 | NTSRIGV | 4337 | AATACGAGTAGGATTGGTGTG | 4338 | 2462 | 1546 | 916 |
| 879 | HVASTAA | 4339 | CACGTAGCGTCGACCGCGGCT | 4340 | 2461 | 2000 | 461 |
| 880 | IARINSH | 4341 | ATAGCCAGAATCAACTCCCAC | 4342 | 2459 | 0 | 2459 |
| 881 | LISSTLR | 4343 | TTGATTTCTAGTACGCTGCGT | 4344 | 2459 | 0 | 2459 |
| 882 | SRLENIV | 4345 | TCGCGGCTCGAAAACATAGTA | 4346 | 2458 | 458 | 2000 |
| 883 | SPTSSPT | 4347 | TCTCCGACGAGTTCGCCGACT | 4348 | 2456 | 0 | 2456 |
| 884 | HDGLGVI | 4349 | CATGATGGTCTTGGTGTTATT | 4350 | 2455 | 2000 | 455 |
| 885 | SDQNGPR | 4351 | TCTGATCAGAATGGGCCTCGG | 4352 | 2454 | 2000 | 454 |
| 886 | SEQKNVW | 4353 | AGTGAGCAGAAGAATGTTTGG | 4354 | 2454 | 0 | 2454 |
| 887 | RIVVSVP | 4355 | CGGATAGTTGTGAGCGTACCC | 4356 | 2452 | 0 | 2452 |
| 888 | QDGPAVK | 4357 | CAGGATGGGCCTGCGGTGAAG | 4358 | 2450 | 0 | 2450 |
| 889 | KKVITDD | 4359 | AAGAAGGTGATTACTGATGAT | 4360 | 2449 | 2000 | 449 |
| 890 | MGGVNNT | 4361 | ATGGGGGGGGTTAATAATACG | 4362 | 2448 | 0 | 2448 |
| 891 | VSSKGEW | 4363 | GTCAGCAGCAAAGGTGAATGG | 4364 | 2447 | 2000 | 447 |
| 892 | GSGQMDA | 4365 | GGGAGTGGGCAGATGGATGCT | 4366 | 2444 | 0 | 2444 |
| 893 | MAGKAPP | 4367 | ATGGCTGGGAAGGCGCCGCCG | 4368 | 2443 | 0 | 2443 |
| 894 | QVRDTMT | 4369 | CAAGTTCGAGACACAATGACC | 4370 | 2442 | 2000 | 442 |
| 895 | GHVTSGD | 4371 | GGCCACGTCACATCTGGGGAC | 4372 | 2442 | 2000 | 442 |
| 896 | SEVSKGI | 4373 | AGTGAGGTTAGTAAGGGTATT | 4374 | 2442 | 2000 | 442 |
| 897 | NRQEHTY | 4375 | AATCGGCAGGAGCATACGTAT | 4376 | 2442 | 0 | 2442 |
| 898 | YVSTVVG | 4377 | TATGTTAGTACTGTTGTGGGG | 4378 | 2441 | 2000 | 441 |
| 899 | SNLSVVI | 4379 | TCTAACCTCTCAGTCGTAATC | 4380 | 2440 | 2000 | 440 |
| 900 | GHPQTTA | 4381 | GGGCATCCTCAGACTACGGCT | 4382 | 2440 | 2000 | 440 |
| 901 | ESSGNKL | 4383 | GAGTCTAGTGGTAATAAGCTG | 4384 | 2439 | 2000 | 439 |
| 902 | NFQADGL | 4385 | AACTTCCAAGCAGACGGACTG | 4386 | 2439 | 2000 | 439 |
| 903 | GTSTLGY | 4387 | GGCACTTCAACCCTCGGCTAC | 4388 | 2438 | 2000 | 438 |
| 904 | MNVDGRD | 4389 | ATGAATGTTGATGGGCGTGAT | 4390 | 2438 | 2000 | 438 |
| 905 | QAIEGNF | 4391 | CAAGCCATCGAAGGGAACTTC | 4392 | 2438 | 1895 | 543 |
| 906 | KSHSENN | 4393 | AAGTCGCATTCGGAGAATAAT | 4394 | 2438 | 0 | 2438 |
| 907 | VNYSVAL | 4395 | GTAAACTACAGTGTTGCACTC | 4396 | 2438 | 0 | 2438 |
| 908 | SGSRITV | 4397 | TCGGGTAGTCGGATTACTGTT | 4398 | 2437 | 0 | 2437 |
| 909 | LSLNDGD | 4399 | CTATCACTTAACGACGGCGAC | 4400 | 2436 | 2000 | 436 |
| 910 | QGGNSGA | 4401 | CAAGGGGGGAACTCGGGCGCA | 4402 | 2435 | 2435 | 0 |
| 911 | LSNMLTV | 4403 | CTGTCTAATATGTTGACTGTT | 4404 | 2435 | 2000 | 435 |
| 912 | AGGGGPR | 4405 | GCAGGCGGAGGCGGACCACGT | 4406 | 2434 | 2000 | 434 |
| 913 | FDKTGVH | 4407 | TTTGATAAGACGGGGGTGCAT | 4408 | 2434 | 2000 | 434 |
| 914 | GRSQLQM | 4409 | GGGCGGTCGCAGTTGCAGATG | 4410 | 2433 | 2000 | 433 |
| 915 | VNAGHGI | 4411 | GTTAATGCTGGGCATGGGATT | 4412 | 2433 | 2000 | 433 |
| 916 | RILQSGV | 4413 | CGGATACTCCAATCGGGTGTG | 4414 | 2432 | 2000 | 432 |
| 917 | RTLGIPS | 4415 | CGGACGTTGGGGATTCCTTCT | 4416 | 2432 | 0 | 2432 |
| 918 | LGGLGGL | 4417 | CTAGGAGGGCTGGGAGGCTTA | 4418 | 2431 | 2000 | 431 |
| 919 | GIVGSVP | 4419 | GGGATTGTGGGTAGTGTTCCG | 4420 | 2427 | 0 | 2427 |
| 920 | SSDRLLA | 4421 | TCTAGCGACAGACTCTTAGCG | 4422 | 2427 | 0 | 2427 |
| 921 | KDVVRGS | 4423 | AAGGATGTGGTGCGGGGTAGT | 4424 | 2426 | 2000 | 426 |
| 922 | LGHSAEP | 4425 | CTGGGACACTCAGCAGAACCC | 4426 | 2426 | 2000 | 426 |
| 923 | STIPNLM | 4427 | AGTACTATTCCTAATCTGATG | 4428 | 2426 | 0 | 2426 |
| 924 | GGTIGGH | 4429 | GGGGGTACGATTGGTGGTCAT | 4430 | 2425 | 2000 | 425 |
| 925 | VPAGLGR | 4431 | GTTCCCGCAGGCTTAGGCCGT | 4432 | 2425 | 0 | 2425 |
| 926 | LVHTTNN | 4433 | CTAGTCCACACGACCAACAAC | 4434 | 2424 | 2000 | 424 |
| 927 | MTSGNLM | 4435 | ATGACTTCCGGCAACCTCATG | 4436 | 2424 | 0 | 2424 |
| 928 | KESLSGS | 4437 | AAGGAGTCGCTTTCGGGTTCT | 4438 | 2423 | 1377 | 1046 |
| 929 | LRVTEIL | 4439 | TTGCGTGTGACGGAGATTCTG | 4440 | 2421 | 2000 | 421 |
| 930 | GHNVGVH | 4441 | GGTCATAATGTTGGTGTTCAT | 4442 | 2419 | 2000 | 419 |
| 931 | LDKVRPA | 4443 | TTGGATAAGGTGCGTCCGGCG | 4444 | 2419 | 2000 | 419 |
| 932 | LVANTPT | 4445 | CTCGTCGCAAACACACCAACC | 4446 | 2418 | 0 | 2418 |
| 933 | SHGSDYK | 4447 | TCACACGGATCCGACTACAAA | 4448 | 2417 | 2274 | 143 |
| 934 | TVHAPGT | 4449 | ACCGTTCACGCGCCAGGCACT | 4450 | 2417 | 2000 | 417 |
| 935 | LNGGHVM | 4451 | CTCAACGGCGGACACGTGATG | 4452 | 2417 | 2000 | 417 |
| 936 | LTLSTGV | 4453 | CTTACGCTGAGTACTGGGGTG | 4454 | 2417 | 2000 | 417 |
| 937 | VVQVNGR | 4455 | GTTGTTCAGGTTAATGGGCGT | 4456 | 2416 | 2007 | 408 |
| 938 | RNGVTSS | 4457 | AGAAACGGAGTAACGAGTTCG | 4458 | 2416 | 2000 | 416 |
| 939 | GSASGEA | 4459 | GGCTCCGCTTCCGGAGAAGCC | 4460 | 2415 | 2000 | 415 |
| 940 | STQAVYV | 4461 | AGTACGCAGGCTGTTTATGTT | 4462 | 2415 | 0 | 2415 |
| 941 | SVDNGKR | 4463 | TCAGTCGACAACGGCAAACGA | 4464 | 2415 | 0 | 2415 |
| 942 | TLHDKVL | 4465 | ACTCTGCATGATAAGGTGTTG | 4466 | 2414 | 2000 | 414 |
| 943 | NDVRGSN | 4467 | AACGACGTCAGAGGGTCCAAC | 4468 | 2414 | 414 | 2000 |
| 944 | HMNITVS | 4469 | CATATGAATATTACGGTTTCG | 4470 | 2413 | 1975 | 438 |
| 945 | TTAAIIR | 4471 | ACGACGGCGGCTATTATTAGG | 4472 | 2413 | 0 | 2413 |
| 946 | VDHGGVV | 4473 | GTGGATCATGGTGGTGTGGTT | 4474 | 2412 | 2000 | 412 |
| 947 | QGGYSGV | 4475 | CAAGGGGGATACTCTGGTGTT | 4476 | 2412 | 2000 | 412 |
| 948 | EPVASTI | 4477 | GAGCCTGTGGCTTCTACTATT | 4478 | 2411 | 2000 | 411 |
| 949 | LGDTAYS | 4479 | TTAGGCGACACCGCTTACTCA | 4480 | 2410 | 0 | 2410 |
| 950 | NGSAGDH | 4481 | AACGGCTCGGCTGGAGACCAC | 4482 | 2409 | 2000 | 409 |
| 951 | TAVHTTS | 4483 | ACCGCAGTTCACACCACATCC | 4484 | 2409 | 1911 | 498 |
| 952 | TGARDQY | 4485 | ACTGGTGCTCGGGATCAGTAT | 4486 | 2409 | 1190 | 1219 |
| 953 | NGSAGDH | 4487 | AATGGGAGTGCGGGTGATCAT | 4488 | 2408 | 2006 | 401 |
| 954 | LAGMGGI | 4489 | CTTGCGGGTATGGGGGGGATT | 4490 | 2407 | 934 | 1474 |
| 955 | THRDAGV | 4491 | ACTCATAGGGATGCTGGTGTG | 4492 | 2405 | 2000 | 405 |
| 956 | YREMGGS | 4493 | TACAGAGAAATGGGCGGCTCC | 4494 | 2405 | 2000 | 405 |
| 957 | ETNLYHA | 4495 | GAGACGAATTTGTATCATGCT | 4496 | 2404 | 2000 | 404 |
| 958 | SGANSSN | 4497 | TCTGGTGCGAATTCGTCTAAT | 4498 | 2402 | 2000 | 402 |
| 959 | IVNSREF | 4499 | ATTGTGAATAGTCGTGAGTTT | 4500 | 2402 | 1418 | 984 |
| 960 | ESLGGPR | 4501 | GAATCCTTGGGAGGCCCTCGA | 4502 | 2402 | 0 | 2402 |
| 961 | VVDSYNK | 4503 | GTTGTTGATTCGTATAATAAG | 4504 | 2401 | 2000 | 401 |
| 962 | GGVSSTN | 4505 | GGAGGAGTCTCGTCTACCAAC | 4506 | 2400 | 2000 | 400 |
| 963 | DALTRLA | 4507 | GATGCTCTGACGCGGTTGGCG | 4508 | 2400 | 2000 | 400 |
| 964 | SLRAGVP | 4509 | AGCCTAAGAGCAGGTGTACCG | 4510 | 2400 | 0 | 2400 |
| 965 | MGWGTNP | 4511 | ATGGGGTGGGGTACTAATCCG | 4512 | 2399 | 0 | 2399 |
| 966 | VESGSLG | 4513 | GTTGAGAGTGGTTCTCTTGGG | 4514 | 2398 | 2000 | 398 |
| 967 | QGGYSLG | 4515 | CAAGGGGGATACAGCTTAGGA | 4516 | 2397 | 1800 | 597 |
| 968 | DSKDVHR | 4517 | GATAGTAAGGATGTTCATAGG | 4518 | 2397 | 0 | 2397 |
| 969 | SANPVAR | 4519 | TCTGCGAATCCGGTTGCGAGG | 4520 | 2396 | 2000 | 396 |
| 970 | SILSGVS | 4521 | TCAATATTATCAGGGGTATCC | 4522 | 2396 | 2000 | 396 |
| 971 | HAADVQR | 4523 | CATGCGGCGGATGTGCAGAGG | 4524 | 2396 | 2000 | 396 |
| 972 | LSRGAEK | 4525 | CTTTCGAGGGGTGCGGAGAAG | 4526 | 2395 | 2000 | 395 |
| 973 | AEGGAPR | 4527 | GCAGAAGGGGGCGCCCCTCGG | 4528 | 2395 | 1733 | 662 |
| 974 | SRNGNVV | 4529 | TCTCGGAATGGGAATGTTGTT | 4530 | 2395 | 0 | 2395 |
| 975 | LVATTLS | 4531 | CTGGTTGCAACTACCCTTTCT | 4532 | 2394 | 2000 | 394 |
| 976 | AHGHVKV | 4533 | GCGCATGGTCATGTGAAGGTG | 4534 | 2394 | 2000 | 394 |
| 977 | NAGVAQA | 4535 | AACGCCGGAGTAGCCCAAGCA | 4536 | 2394 | 2000 | 394 |
| 978 | NRDNVAF | 4537 | AATCGGGATAATGTTGCTTTT | 4538 | 2394 | 0 | 2394 |
| 979 | SVHSGLL | 4539 | AGTGTTCATAGTGGGCTGCTT | 4540 | 2393 | 2000 | 393 |
| 980 | RQMGITV | 4541 | CGGCAGATGGGTATTACTGTT | 4542 | 2393 | 2000 | 393 |
| 981 | LSHIGGL | 4543 | CTATCACACATAGGAGGCCTA | 4544 | 2392 | 2000 | 392 |
| 982 | GTVTLGY | 4545 | GGGACGGTGACTTTGGGGTAT | 4546 | 2391 | 2000 | 391 |
| 983 | SYGDGGV | 4547 | TCTTACGGAGACGGAGGAGTG | 4548 | 2391 | 2000 | 391 |
| 984 | NHVSGSS | 4549 | AATCATGTTTCTGGTAGTTCT | 4550 | 2391 | 1253 | 1138 |
| 985 | GSRALSS | 4551 | GGATCACGTGCCCTGTCAAGT | 4552 | 2390 | 2000 | 390 |
| 986 | GLNHVGL | 4553 | GGCCTCAACCACGTGGGCCTT | 4554 | 2389 | 2000 | 389 |
| 987 | TLTNGMP | 4555 | ACGCTTACTAATGGGATGCCT | 4556 | 2389 | 1699 | 690 |
| 988 | MGASVTH | 4557 | ATGGGAGCGTCCGTGACTCAC | 4558 | 2386 | 1864 | 522 |
| 989 | VQQLAIK | 4559 | GTGCAGCAGTTGGCGATTAAG | 4560 | 2385 | 0 | 2385 |
| 990 | LSNLSNG | 4561 | CTTAGTAATCTGTCGAATGGT | 4562 | 2384 | 2000 | 384 |
| 991 | IAGVAQS | 4563 | ATAGCTGGAGTGGCTCAATCA | 4564 | 2384 | 1960 | 424 |
| 992 | EYALTEA | 4565 | GAGTATGCGTTGACGGAGGCT | 4566 | 2383 | 0 | 2383 |
| 993 | AADSSGR | 4567 | GCCGCAGACAGCAGTGGCAGG | 4568 | 2383 | 0 | 2383 |
| 994 | ILVDAHT | 4569 | ATCCTAGTGGACGCGCACACA | 4570 | 2382 | 2000 | 382 |
| 995 | ADVHVRL | 4571 | GCTGATGTGCATGTGCGTTTG | 4572 | 2382 | 0 | 2382 |
| 996 | YVQAVPS | 4573 | TATGTGCAGGCGGTTCCTTCT | 4574 | 2381 | 2000 | 381 |
| 997 | ALAQNNM | 4575 | GCCTTAGCCCAAAACAACATG | 4576 | 2380 | 2000 | 380 |
| 998 | QGGDSGG | 4577 | CAAGGCGGAGACTCGGGTGGG | 4578 | 2379 | 2379 | 0 |
| 999 | RVEISAK | 4579 | AGGGTTGAGATTTCTGCGAAG | 4580 | 2379 | 1802 | 577 |
| 1000 | LGRVEHT | 4581 | TTAGGCAGAGTGGAACACACT | 4582 | 2379 | 0 | 2379 |

Macaque_allCNS_peptide rank

| | | SEQ | | SEQ | |
|---|---|---|---|---|---|
| | | ID | | ID | |
| Rank | Peptide | NO: | Sequence | NO: | k-medoids cluster # |
| 1 | PTQGTVR | 4583 | CCCACACAAGGCACAGTCCGT | 4584 | 128 |
| 2 | PTQGTFR | 4585 | CCGACACAAGGAACATTCAGG | 4586 | 128 |
| 3 | PSQGTLR | 4587 | CCTTCTCAGGGGACGCTTCGG | 4588 | 128 |
| 4 | NLGAALS | 4589 | AACCTTGGGGCTGCCCTATCG | 4590 | 203 |
| 5 | PKPSHGE | 4591 | CCTAAACCATCTCACGGAGAA | 4592 | 62 |
| 6 | PTPGTLR | 4593 | CCTACTCCGGGGACGCTTCGG | 4594 | 128 |
| 7 | PTQGTLR | 4595 | CCTACTCAGGGGACGCTTCGG | 4596 | 128 |
| 8 | QDGPAVK | 4597 | CAGGATGGGCCTGCGGTGAAG | 4598 | 260 |
| 9 | PNQGTLR | 4599 | CCAAACCAAGGTACTCTACGA | 4600 | 128 |
| 10 | ESLAGVR | 4601 | GAATCGTTGGCAGGGGTGCGT | 4602 | 316 |
| 11 | AADSSAR | 4603 | GCCGCTGACTCATCGGCCCGT | 4604 | 10 |
| 12 | SHGSDPK | 4605 | TCTCATGGTTCTGATCCGAAG | 4606 | 174 |
| 13 | AAGVIPN | 4607 | GCCGCCGGAGTGATACCTAAC | 4608 | 179 |
| 14 | KNPGVDT | 4609 | AAAAACCCTGGAGTTGACACG | 4610 | 337 |
| 15 | PAQGTLR | 4611 | CCGGCGCAAGGAACACTACGA | 4612 | 128 |
| 16 | GRSQLPM | 4613 | GGCCGATCACAACTTCCAATG | 4614 | 239 |
| 17 | VTTLSPV | 4615 | GTCACGACTTTGAGTCCAGTT | 4616 | 272 |
| 18 | HSEGVGR | 4617 | CACTCGGAAGGAGTCGGACGC | 4618 | 134 |
| 19 | SHGYDSK | 4619 | TCTCATGGTTATGATTCGAAG | 4620 | 174 |
| 20 | NQLGELV | 4621 | AACCAACTCGGCGAACTAGTG | 4622 | 209 |
| 21 | NGMGDVT | 4623 | AACGGCATGGGGGACGTTACT | 4624 | 312 |
| 22 | VGGNVVH | 4625 | GTTGGTGGTAATGTTGTTCAT | 4626 | 111 |
| 23 | LVTGMSS | 4627 | CTTGTTACTGGGATGAGTTCT | 4628 | 22 |
| 24 | MNVGHVL | 4629 | ATGAATGTGGGTCATGTTCTG | 4630 | 268 |
| 25 | MSISEPR | 4631 | ATGTCTATTAGTGAGCCGCGG | 4632 | 207 |
| 26 | ALGDALR | 4633 | GCACTAGGCGACGCATTACGC | 4634 | 191 |
| 27 | QYAVSGG | 4635 | CAATACGCAGTGAGCGGCGGT | 4636 | 345 |
| 28 | VLASLGP | 4637 | GTTCTGGCTTCGCTTGGTCCT | 4638 | 176 |
| 29 | GRDLTPA | 4639 | GGTCGGGATCTTACGCCTGCT | 4640 | 235 |
| 30 | RIVDSVP | 4641 | AGGATTGTGGATAGTGTTCCG | 4642 | 120 |
| 31 | VDHGGVV | 4643 | GTGGATCATGGTGGTGTGGTT | 4644 | 274 |
| 32 | ASDAVLR | 4645 | GCATCCGACGCCGTCCTAAGG | 4646 | 31 |
| 33 | ILVDAYA | 4647 | ATACTAGTAGACGCGTACGCT | 4648 | 175 |
| 34 | PTEGTLR | 4649 | CCGACAGAAGGCACACTGCGA | 4650 | 128 |
| 35 | TDALTTK | 4651 | ACTGATGCGCTTACGACTAAG | 4652 | 145 |
| 36 | RVDSEKL | 4653 | AGGGTGGATTCGGAGAAGCTT | 4654 | 146 |
| 37 | KNPGVDS | 4655 | AAGAATCCGGGGGTGGATTCT | 4656 | 337 |
| 38 | RTDGADH | 4657 | CGCACAGACGGAGCAGACCAC | 4658 | 252 |
| 39 | LSSTDGV | 4659 | CTGAGTTCGACTGATGGGGTT | 4660 | 151 |
| 40 | AVFSSQK | 4661 | GCTGTATTCTCCAGTCAAAAA | 4662 | 39 |
| 41 | TVITGAP | 4663 | ACTGTGATCACTGGCGCCCCC | 4664 | 44 |
| 42 | LESAAMI | 4665 | CTGGAGTCGGCTGCTATGATT | 4666 | 41 |
| 43 | RVLTSDV | 4667 | CGTGTTCTGACGTCTGATGTG | 4668 | 159 |
| 44 | PEPRSSY | 4669 | CCTGAGCCGCGTAGTAGTTAT | 4670 | 204 |
| 45 | ESRNDVV | 4671 | GAGTCGAGGAATGATGTTGTT | 4672 | 173 |
| 46 | RHIADAS | 4673 | AGACACATAGCGGACGCGTCG | 4674 | 347 |
| 47 | HAAGASS | 4675 | CATGCGGCGGGTGCTAGTAGT | 4676 | 46 |
| 48 | HTLSTGV | 4677 | CACACCCTAAGCACGGGAGTA | 4678 | 171 |
| 49 | TVADPRA | 4679 | ACTGTTGCGGATCCGCGGGCG | 4680 | 296 |
| 50 | SAGGSLQ | 4681 | AGTGCTGGTGGGAGTCTTCAG | 4682 | 49 |
| 51 | MANMLSV | 4683 | ATGGCGAACATGTTATCGGTG | 4684 | 167 |
| 52 | SLGEGRH | 4685 | AGTTTAGGCGAAGGGCGTCAC | 4686 | 90 |
| 53 | RESLEAL | 4687 | AGGGAGAGTCTTGAGGCGTTG | 4688 | 270 |
| 54 | LAGLGGP | 4689 | CTTGCGGGTTTGGGGGGGCCT | 4690 | 195 |
| 55 | LSLNDVV | 4691 | CTGAGTTTGAATGATGTGGTT | 4692 | 173 |
| 56 | ATDSSVR | 4693 | GCCACCGACAGCAGTGTCCGT | 4694 | 55 |
| 57 | STINTLM | 4695 | AGTACTATTAATACTCTGATG | 4696 | 56 |
| 58 | LSRDVAV | 4697 | TTGTCGAGGGATGTGGCGGTT | 4698 | 97 |
| 59 | QYVVSGA | 4699 | CAGTATGTTGTTAGTGGTGCG | 4700 | 345 |
| 60 | LIGAALD | 4701 | CTAATCGGCGCAGCACTCGAC | 4702 | 203 |
| 61 | TMANSER | 4703 | ACGATGGCAAACTCGGAACGC | 4704 | 60 |
| 62 | GINEHVA | 4705 | GGGATCAACGAACACGTAGCC | 4706 | 331 |
| 63 | SNLGETV | 4707 | TCGAATTTGGGGGAGACGGTT | 4708 | 180 |
| 64 | GARMVMT | 4709 | GGTGCGCGGATGGTTATGACT | 4710 | 269 |
| 65 | AMGGETA | 4711 | GCGATGGGTGGTGAGACTGCT | 4712 | 185 |
| 66 | PTHGTLR | 4713 | CCGACCCACGGTACACTGCGA | 4714 | 128 |
| 67 | LNGVTIT | 4715 | CTCAACGGCGTCACCATCACC | 4716 | 305 |
| 68 | SVSHVVV | 4717 | TCGGTCTCTCACGTCGTCGTA | 4718 | 202 |
| 69 | DVVLLTR | 4719 | GATGTTGTTTTGTTGACTAGG | 4720 | 6 |
| 70 | VGLLATV | 4721 | GTCGGTCTCCTTGCAACAGTG | 4722 | 336 |
| 71 | ASESSTR | 4723 | GCATCTGAAAGCTCAACACGG | 4724 | 70 |
| 72 | RVGSSED | 4725 | CGGGTTGGGAGCTCCGAAGAC | 4726 | 306 |
| 73 | LRVTENP | 4727 | CTTCGGGTCACCGAAAACCCC | 4728 | 237 |
| 74 | VTEHTQF | 4729 | GTGACTGAGCATACGCAGTTT | 4730 | 162 |
| 75 | SQAEGSV | 4731 | TCCCAAGCGGAAGGCAGCGTG | 4732 | 74 |
| 76 | VLLGINT | 4733 | GTCCTGCTCGGAATAAACACC | 4734 | 283 |
| 77 | LDSGIPR | 4735 | CTCGACTCTGGTATCCCCAGA | 4736 | 134 |
| 78 | GLGLAAN | 4737 | GGTTTGGGTTTGGCGGCGAAT | 4738 | 225 |
| 79 | VMSGTSH | 4739 | GTTATGTCGGGTACTAGTCAT | 4740 | 238 |
| 80 | DVAAGYR | 4741 | GACGTAGCGGCAGGATACCGA | 4742 | 143 |
| 81 | SIGDLGK | 4743 | AGTATCGGTGACCTAGGTAAA | 4744 | 137 |
| 82 | NGSSIGV | 4745 | AACGGCTCATCTATCGGCGTG | 4746 | 299 |
| 83 | LERGHMY | 4747 | CTCGAAAGAGGCCACATGTAC | 4748 | 41 |
| 84 | ITENASR | 4749 | ATTACTGAGAATGCGTCGCGG | 4750 | 83 |
| 85 | VHDSTPL | 4751 | GTGCATGATTCGACTCCGTTG | 4752 | 325 |
| 86 | TLALSER | 4753 | ACCTTAGCCTTATCAGAACGA | 4754 | 85 |
| 87 | TVDSPMR | 4755 | ACCGTCGACAGCCCTATGCGA | 4756 | 40 |
| 88 | STLHTSI | 4757 | AGTACTCTTCATACTTCGATT | 4758 | 254 |
| 89 | VGSLTAS | 4759 | GTGGGGTCGCTTACGGCTAGT | 4760 | 88 |
| 90 | MAGGTNP | 4761 | ATGGCAGGTGGCACAAACCCT | 4762 | 195 |
| 91 | SLSDGSL | 4763 | TCTCTGTCTGATGGTTCTCTT | 4764 | 90 |
| 92 | IHFSGDN | 4765 | ATCCACTTCAGCGGCGACAAC | 4766 | 45 |
| 93 | TGRVEAA | 4767 | ACGGGTAGGGTTGAGGCGGCG | 4768 | 333 |
| 94 | TTAAIVT | 4769 | ACGACGGCGGCTATTGTTACG | 4770 | 93 |
| 95 | SIQSEVT | 4771 | AGCATCCAATCCGAAGTTACC | 4772 | 4 |
| 96 | DSSGGGT | 4773 | GACAGCTCAGGCGGGGGCACA | 4774 | 37 |
| 97 | TMAISDR | 4775 | ACTATGGCGATTTCTGATCGG | 4776 | 262 |
| 98 | RVENGGT | 4777 | CGAGTGGAAAACGGCGGGACC | 4778 | 295 |
| 99 | REALALT | 4779 | AGGGAGGCGCTGGCTCTGACG | 4780 | 270 |
| 100 | IVTPTNT | 4781 | ATTGTTACTCCTACGAATACG | 4782 | 77 |
| 101 | LTSDNLA | 4783 | CTTACCTCAGACAACCTAGCC | 4784 | 280 |
| 102 | DAPRDGA | 4785 | GACGCACCCCGCGACGGGGCT | 4786 | 151 |
| 103 | AVLSQNI | 4787 | GCTGTGTTGTCTCAGAATATT | 4788 | 102 |
| 104 | VLLGSNR | 4789 | GTGCTTTTGGGTAGTAATAGG | 4790 | 283 |
| 105 | SMAVTAK | 4791 | AGTATGGCGGTGACGGCGAAG | 4792 | 104 |
| 106 | WSSELHA | 4793 | TGGTCTAGTGAGTTGCATGCT | 4794 | 33 |
| 107 | ENTVSPV | 4795 | GAAAACACAGTGAGCCCCGTC | 4796 | 272 |
| 108 | LNMGPLH | 4797 | CTGAATATGGGTCCTTTGCAT | 4798 | 231 |
| 109 | GRGTNDH | 4799 | GGTCGGGGTACGAATGATCAT | 4800 | 225 |
| 110 | STEYAML | 4801 | TCTACTGAGTATGCGATGTTG | 4802 | 8 |
| 111 | MGSNGQV | 4803 | ATGGGGTCTAATGGGCAGGTT | 4804 | 286 |
| 112 | LAGSVVV | 4805 | CTGGCGGGTTCGGTTGTTGTG | 4806 | 111 |
| 113 | YSMTVTT | 4807 | TATAGTATGACGGTTACGACT | 4808 | 80 |
| 114 | VLVGTSL | 4809 | GTTCTTGTTGGGACGAGTTTG | 4810 | 113 |
| 115 | MVTPTNR | 4811 | ATGGTGACACCCACAAACCGC | 4812 | 77 |
| 116 | VTTLTPV | 4813 | GTGACTACGCTTACTCCTGTG | 4814 | 272 |
| 117 | QTGEAAV | 4815 | CAGACGGGGGAGGCGGCGGTT | 4816 | 116 |
| 118 | NDRITST | 4817 | AACGACCGAATAACCTCAACT | 4818 | 157 |
| 119 | SDGKTHT | 4819 | TCAGACGGCAAAACCCACACC | 4820 | 33 |
| 120 | TSLLPQT | 4821 | ACGTCTCTGCTTCCTCAGACT | 4822 | 292 |
| 121 | PSLEHLA | 4823 | CCTAGTCTTGAGCATTTGGCT | 4824 | 349 |
| 122 | DHGSFAK | 4825 | GATCATGGTAGTTTTGCGAAG | 4826 | 174 |
| 123 | PTNGYPL | 4827 | CCCACAAACGGGTACCCGCTC | 4828 | 341 |
| 124 | TLTDVVH | 4829 | ACTCTTACTGATGTGGTGCAT | 4830 | 261 |
| 125 | LADGSVR | 4831 | TTAGCAGACGGCTCCGTCCGC | 4832 | 255 |
| 126 | GGVSSTN | 4833 | GGTGGTGTTTCTTCGACTAAT | 4834 | 335 |
| 127 | SHGTDSK | 4835 | AGTCACGGCACGGACTCTAAA | 4836 | 174 |
| 128 | ALATDMS | 4837 | GCGCTGGCTACTGATATGTCG | 4838 | 127 |
| 129 | QVRDTMT | 4839 | CAAGTCAGAGACACGATGACC | 4840 | 318 |
| 130 | NGYTEGR | 4841 | AATGGGTATACGGAGGGGCGT | 4842 | 299 |
| 131 | DSRVSGD | 4843 | GATAGTCGTGTGTCGGGGGAT | 4844 | 37 |
| 132 | VLSGEEL | 4845 | GTTCTTAGTGGGGAGGAGTTG | 4846 | 131 |
| 133 | HNGQVGV | 4847 | CATAATGGGCAGGTTGGTGTG | 4848 | 299 |
| 134 | HNSHVLT | 4849 | CACAACTCCCACGTATTAACC | 4850 | 0 |
| 135 | RPEIEVR | 4851 | CGGCCGGAGATTGAGGTTAGG | 4852 | 38 |
| 136 | KGSDSPM | 4853 | AAAGGATCGGACTCACCGATG | 4854 | 278 |
| 137 | DQLNDGR | 4855 | GATCAGCTGAATGATGGGCGG | 4856 | 54 |
| 138 | SLLHDGA | 4857 | AGTTTGTTGCATGATGGGGCG | 4858 | 34 |
| 139 | RDTQYDH | 4859 | CGTGATACGCAGTATGATCAT | 4860 | 261 |
| 140 | PREHNQA | 4861 | CCGCGTGAGCATAATCAGGCT | 4862 | 338 |
| 141 | SRLENIS | 4863 | TCGCGTCTTGAAAACATCTCC | 4864 | 349 |
| 142 | FDQTHKT | 4865 | TTTGATCAGACGCATAAGACT | 4866 | 245 |
| 143 | MTGISIV | 4867 | ATGACAGGCATCTCTATCGTA | 4868 | 142 |
| 144 | ASSHVTV | 4869 | GCTTCGAGTCATGTTACTGTG | 4870 | 0 |
| 145 | SHGSDLK | 4871 | AGCCACGGGAGCGACCTAAAA | 4872 | 174 |
| 146 | NIGADPK | 4873 | AACATCGGGGCCGACCCCAAA | 4874 | 54 |
| 147 | TLGSLSQ | 4875 | ACACTAGGGTCCCTGTCACAA | 4876 | 137 |
| 148 | PTQGTIR | 4877 | CCTACTCAGGGGACGATTCGG | 4878 | 128 |
| 149 | FTGGTGT | 4879 | TTTACTGGTGGTACGGGTACT | 4880 | 164 |
| 150 | IPSTGAQ | 4881 | ATTCCGAGTACGGGGGCGCAG | 4882 | 30 |
| 151 | STLHTTT | 4883 | AGTACTCTTCATACTACGACT | 4884 | 150 |
| 152 | GGTNSAH | 4885 | GGTGGAACAAACTCAGCGCAC | 4886 | 335 |
| 153 | NVGLVSP | 4887 | AACGTAGGGCTCGTATCACCA | 4888 | 197 |
| 154 | VYESTVR | 4889 | GTTTATGAGAGTACGGTGAGG | 4890 | 153 |
| 155 | MGASDTH | 4891 | ATGGGGGCTAGTGATACGCAT | 4892 | 26 |
| 156 | VIATGNP | 4893 | GTTATTGCTACGGGGAATCCT | 4894 | 176 |
| 157 | PEQQKVW | 4895 | CCTGAGCAGCAGAAGGTTTGG | 4896 | 94 |
| 158 | SDGQFGR | 4897 | TCTGACGGTCAATTCGGACGA | 4898 | 54 |
| 159 | IMTSVTM | 4899 | ATCATGACAAGTGTTACAATG | 4900 | 136 |
| 160 | AQDHGTL | 4901 | GCGCAGGATCATGGGACGTTG | 4902 | 286 |
| 161 | GGLVVVG | 4903 | GGCGGACTAGTAGTCGTGGGG | 4904 | 269 |
| 162 | TSVESNL | 4905 | ACGTCGGTGGAGTCGAATCTT | 4906 | 135 |
| 163 | SVTDIKH | 4907 | TCGGTGACGGACATAAAACAC | 4908 | 261 |
| 164 | LSMTDGL | 4909 | CTGAGTATGACTGATGGGCTT | 4910 | 151 |
| 165 | LNMKADG | 4911 | TTAAACATGAAAGCAGACGGA | 4912 | 192 |
| 166 | LNSGVSR | 4913 | CTCAACAGTGGTGTCAGCCGC | 4914 | 134 |
| 167 | STIPTLL | 4915 | AGTACTATTCCTACTCTGTTG | 4916 | 166 |
| 168 | TFGIDAS | 4917 | ACATTCGGAATCGACGCGTCC | 4918 | 5 |
| 169 | AVGVILN | 4919 | GCGGTGGGTGTTATTCTGAAT | 4920 | 179 |
| 170 | GSREDVR | 4921 | GGGAGTAGGGAGGATGTGCGT | 4922 | 343 |
| 171 | HLHNTLN | 4923 | CATCTTCATAATACTCTTAAT | 4924 | 56 |
| 172 | VSVAVGL | 4925 | GTTTCGGTGGCTGTTGGGTTG | 4926 | 133 |
| 173 | LGVSRDL | 4927 | CTGGGTGTGTCTCGGGATCTG | 4928 | 99 |
| 174 | KGSDNTM | 4929 | AAGGGTTCTGATAATACTATG | 4930 | 278 |
| 175 | ASIPTLN | 4931 | GCATCCATACCAACGCTAAAC | 4932 | 332 |
| 176 | YHASDSK | 4933 | TATCATGCTTCTGATTCGAAG | 4934 | 174 |
| 177 | QYSELHH | 4935 | CAATACTCCGAATTGCACCAC | 4936 | 261 |
| 178 | DLTTPVR | 4937 | GATTTGACTACTCCGGTGCGT | 4938 | 342 |
| 179 | IGTEISS | 4939 | ATTGGTACGGAGATTTCGTCG | 4940 | 184 |
| 180 | STDMRSP | 4941 | AGTACGGATATGAGGTCGCCG | 4942 | 319 |
| 181 | TKITNED | 4943 | ACAAAAATCACTAACGAAGAC | 4944 | 258 |
| 182 | STLQGEA | 4945 | AGCACCCTCCAAGGGGAAGCA | 4946 | 181 |
| 183 | PLLGNTI | 4947 | CCGCTTTTGGGGAATACGATT | 4948 | 328 |
| 184 | NGLQVSI | 4949 | AATGGGCTGCAGGTTAGTATT | 4950 | 190 |
| 185 | AVTNPLM | 4951 | GCGGTTACTAATCCTTTGATG | 4952 | 208 |
| 186 | DVTVSMR | 4953 | GATGTTACTGTTTCTATGCGT | 4954 | 342 |
| 187 | NQLAEQV | 4955 | AATCAGTTGGCGGAGCAGGTT | 4956 | 226 |
| 188 | RPDASST | 4957 | AGGCCTGATGCTTCTTCGACG | 4958 | 311 |
| 189 | DTSLRLM | 4959 | GACACCTCTCTACGCCTTATG | 4960 | 35 |
| 190 | TLPELKL | 4961 | ACGTTGCCGGAGTTGAAGCTT | 4962 | 301 |
| 191 | QNGLQLL | 4963 | CAGAATGGGTTGCAGCTTTTG | 4964 | 142 |
| 192 | ASREVLY | 4965 | GCCAGTCGCGAAGTACTCTAC | 4966 | 343 |
| 193 | IASDIGR | 4967 | ATTGCTTCGGATATTGGTCGG | 4968 | 309 |
| 194 | VADSYNL | 4969 | GTCGCAGACAGTTACAACCTA | 4970 | 141 |
| 195 | STVGINV | 4971 | AGTACGGTCGGGATCAACGTT | 4972 | 194 |
| 196 | GVAGRIL | 4973 | GGGGTGGCTGGGCGTATTCTG | 4974 | 149 |
| 197 | NEAVNVR | 4975 | AATGAGGCTGTTAATGTTCGG | 4976 | 91 |
| 198 | TVGHDNK | 4977 | ACCGTAGGACACGACAACAAA | 4978 | 54 |
| 199 | TLQQLQL | 4979 | ACTCTCCAACAACTGCAATTG | 4980 | 301 |
| 200 | ALSGLAN | 4981 | GCATTGAGCGGCCTGGCGAAC | 4982 | 199 |
| 201 | ALGTQGS | 4983 | GCTCTGGGTACGCAGGGTTCT | 4984 | 291 |
| 202 | PNERLAV | 4985 | CCTAACGAACGATTGGCAGTC | 4986 | 144 |
| 203 | GVAATNT | 4987 | GGAGTTGCAGCCACAAACACG | 4988 | 132 |
| 204 | WDHNSLK | 4989 | TGGGACCACAACAGCTTGAAA | 4990 | 61 |
| 205 | LVGVVEP | 4991 | CTTGTTGGTGTGGTTGAGCCG | 4992 | 287 |
| 206 | TLTDRAS | 4993 | ACGTTGACGGATAGGGCGTCT | 4994 | 205 |
| 207 | SGSNTGH | 4995 | TCGGGGTCTAATACGGGTCAT | 4996 | 299 |
| 208 | VLASHGT | 4997 | GTTCTGGCTTCGCATGGTACT | 4998 | 176 |
| 209 | AVGNVLL | 4999 | GCTGTGGGGAATGTGCTTTTG | 5000 | 208 |
| 210 | NTVVNDP | 5001 | AACACAGTCGTGAACGACCCT | 5002 | 120 |
| 211 | KLMDSRD | 5003 | AAGCTGATGGATTCGCGGGAT | 5004 | 249 |
| 212 | RNQPEAM | 5005 | AGGAACCAACCAGAAGCCATG | 5006 | 252 |
| 213 | VIAGLGV | 5007 | GTGATCGCGGGACTCGGCGTC | 5008 | 212 |
| 214 | RGQSDPL | 5009 | CGGGGGCAGTCTGATCCGTTG | 5010 | 26 |
| 215 | GLNEHES | 5011 | GGGCTTAACGAACACGAATCT | 5012 | 331 |
| 216 | GVVNDER | 5013 | GGCGTTGTCAACGACGAACGG | 5014 | 60 |
| 217 | GTVGSMV | 5015 | GGTACGGTGGGTTCTATGGTT | 5016 | 216 |
| 218 | LTGERIL | 5017 | CTAACCGGTGAACGCATACTT | 5018 | 142 |
| 219 | PTQGVSM | 5019 | CCAACCCAAGGAGTTTCGATG | 5020 | 128 |
| 220 | AAREELN | 5021 | GCGGCTCGGGAGGAGCTTAAT | 5022 | 343 |
| 221 | FNGLPAQ | 5023 | TTCAACGGTCTCCCCGCACAA | 5024 | 160 |
| 222 | HTIAASM | 5025 | CACACCATAGCCGCAAGTATG | 5026 | 221 |
| 223 | TDAGDGK | 5027 | ACAGACGCGGGGGACGGCAAA | 5028 | 157 |
| 224 | SDLRPPL | 5029 | TCGGATCTTCGGCCGCCGCTG | 5030 | 244 |
| 225 | AGLSQNL | 5031 | GCTGGGTTGTCTCAGAATCTT | 5032 | 224 |
| 226 | GMGASSK | 5033 | GGTATGGGGGCGTCTTCTAAG | 5034 | 225 |
| 227 | SQLAELV | 5035 | AGTCAGTTGGCGGAGCTGGTT | 5036 | 209 |
| 228 | LTRGEEK | 5037 | CTTACGAGGGGTGAGGAGAAG | 5038 | 294 |
| 229 | AGGVILN | 5039 | GCGGGGGGTGTTATTCTGAAT | 5040 | 179 |
| 230 | GNGTGVL | 5041 | GGAAACGGCACCGGGGTCCTA | 5042 | 172 |
| 231 | VVSGIPN | 5043 | GTGGTGTCTGGTATTCCGAAT | 5044 | 199 |
| 232 | GVMAAGI | 5045 | GGAGTCATGGCCGCGGGTATC | 5046 | 34 |
| 233 | GVANESP | 5047 | GGTGTGGCGAATGAGAGTCCG | 5048 | 197 |
| 234 | ELMASTI | 5049 | GAGCTTATGGCTTCTACTATT | 5050 | 130 |
| 235 | NLGVVQV | 5051 | AACCTAGGAGTCGTACAAGTC | 5052 | 28 |
| 236 | RTTPDVP | 5053 | CGTACGACTCCCGACGTACCT | 5054 | 107 |
| 237 | LESLSHH | 5055 | CTGGAGTCGCTTTCTCATCAT | 5056 | 41 |
| 238 | LSLTHGD | 5057 | CTGAGTTTGACTCATGGGGAT | 5058 | 259 |
| 239 | DGVNTAL | 5059 | GATGGGGTTAATACGGCGTTG | 5060 | 154 |
| 240 | QDGPAEK | 5061 | CAGGATGGGCCTGCGGAGAAG | 5062 | 260 |
| 241 | SPAGLGK | 5063 | AGCCCCGCGGGCCTAGGCAAA | 5064 | 12 |
| 242 | RYNDEST | 5065 | AGATACAACGACGAATCCACT | 5066 | 295 |
| 243 | VVAGTNS | 5067 | GTCGTTGCAGGTACAAACTCG | 5068 | 108 |
| 244 | WSGQIHV | 5069 | TGGAGTGGTCAGATTCATGTG | 5070 | 264 |
| 245 | ANSHTNS | 5071 | GCAAACAGTCACACCAACTCT | 5072 | 303 |
| 246 | VVQAPGR | 5073 | GTTGTTCAGGCTCCTGGGCGT | 5074 | 176 |
| 247 | ATQGTLR | 5075 | GCTACTCAGGGGACGCTTCGG | 5076 | 128 |
| 248 | RVDPSGL | 5077 | CGTGTGGATCCTTCTGGGCTG | 5078 | 86 |
| 249 | TKDIGVM | 5079 | ACGAAAGACATAGGCGTAATG | 5080 | 200 |
| 250 | GGKGEGP | 5081 | GGTGGGAAGGGTGAGGGTCCG | 5082 | 149 |
| 251 | RGAVSTE | 5083 | CGGGGGGCTGTGTCGACTGAG | 5084 | 250 |
| 252 | STDRESR | 5085 | TCGACTGATCGGGAGTCGCGG | 5086 | 72 |
| 253 | NLHTAEA | 5087 | AACCTCCACACTGCTGAAGCG | 5088 | 302 |
| 254 | MSTAMSL | 5089 | ATGTCGACGGCGATGAGTCTG | 5090 | 126 |
| 255 | TGSSAML | 5091 | ACGGGGAGTTCGGCGATGCTT | 5092 | 125 |
| 256 | LISGTLR | 5093 | TTGATTTCTGGTACGCTGCGT | 5094 | 124 |
| 257 | GIGGVIS | 5095 | GGTATTGGTGGTGTGATTTCG | 5096 | 234 |
| 258 | RLENRGV | 5097 | CGGTTGGAGAATAGGGGGGTT | 5098 | 243 |
| 259 | LPNGGGF | 5099 | CTGCCGAATGGGGGGGGGTTT | 5100 | 30 |
| 260 | TGDRDQN | 5101 | ACTGGTGATCGGGATCAGAAT | 5102 | 251 |
| 261 | SLAITER | 5103 | AGTTTGGCGATTACTGAGCGG | 5104 | 123 |
| 262 | STLISET | 5105 | TCCACGTTGATATCAGAAACC | 5106 | 122 |
| 263 | DVRGSDI | 5107 | GACGTACGGGGGTCTGACATC | 5108 | 156 |
| 264 | NLSLSLR | 5109 | AATCTGTCTCTGTCGTTGCGT | 5110 | 263 |
| 265 | GSGGVSV | 5111 | GGTTCGGGTGGTGTTAGTGTG | 5112 | 264 |
| 266 | LVSGLGP | 5113 | CTTGTGAGTGGGCTGGGTCCG | 5114 | 212 |
| 267 | LTKSTEW | 5115 | CTCACCAAATCCACAGAATGG | 5116 | 281 |
| 268 | TTRADPA | 5117 | ACTACTCGGGCTGATCCTGCG | 5118 | 273 |
| 269 | ASMSAVN | 5119 | GCATCAATGTCAGCTGTCAAC | 5120 | 121 |
| 270 | RVDSAQP | 5121 | AGAGTAGACAGTGCCCAACCC | 5122 | 186 |
| 271 | EPSLGSK | 5123 | GAACCAAGTCTCGGGTCGAAA | 5124 | 157 |
| 272 | YLGADAA | 5125 | TATCTTGGTGCTGATGCTGCT | 5126 | 68 |
| 273 | RDEAYRA | 5127 | AGGGATGAGGCTTATCGTGCG | 5128 | 233 |
| 274 | RVAMSVT | 5129 | AGGGTGGCGATGTCTGTGACG | 5130 | 32 |
| 275 | SHGSDSN | 5131 | TCGCACGGCTCCGACTCCAAC | 5132 | 174 |
| 276 | ETRMISE | 5133 | GAGACGCGTATGATTTCGGAG | 5134 | 167 |
| 277 | AHIGTLT | 5135 | GCACACATCGGAACTCTCACC | 5136 | 53 |
| 278 | MGGVTNP | 5137 | ATGGGAGGTGTCACCAACCCC | 5138 | 195 |
| 279 | PSPSVTL | 5139 | CCGTCGCCTAGTGTTACTTTG | 5140 | 95 |
| 280 | SSSGAAW | 5141 | TCGAGTAGTGGGGCGGCGTGG | 5142 | 8 |
| 281 | HTQGTLR | 5143 | CATACTCAGGGGACGCTTCGG | 5144 | 128 |
| 282 | LTDVTQM | 5145 | TTAACCGACGTCACACAAATG | 5146 | 281 |
| 283 | ILSSATD | 5147 | ATTCTTAGTTCGGCGACTGAT | 5148 | 119 |
| 284 | NGSNDLS | 5149 | AACGGTAGCAACGACCTTTCA | 5150 | 59 |
| 285 | KGSDNHM | 5151 | AAAGGCAGTGACAACCACATG | 5152 | 278 |
| 286 | QEQGTTT | 5153 | CAGGAGCAGGGTACGACTACT | 5154 | 285 |
| 287 | PGVAMVT | 5155 | CCCGGGGTCGCTATGGTAACT | 5156 | 17 |
| 288 | LVGVSSE | 5157 | CTGGTGGGTGTGTCGTCTGAG | 5158 | 287 |
| 289 | SGGTRGP | 5159 | TCTGGTGGGACTCGTGGTCCT | 5160 | 310 |
| 290 | AIQTNDA | 5161 | GCAATCCAAACCAACGACGCG | 5162 | 289 |
| 291 | LISTTLR | 5163 | TTGATTTCTACTACGCTGCGT | 5164 | 118 |
| 292 | ALGDQAR | 5165 | GCGTTAGGGGACCAAGCGCGT | 5166 | 291 |
| 293 | GLNDHVA | 5167 | GGTCTGAATGATCATGTGGCG | 5168 | 331 |
| 294 | NDVSLAT | 5169 | AATGATGTGAGTCTGGCTACT | 5170 | 293 |
| 295 | KMAITDD | 5171 | AAAATGGCTATAACAGACGAC | 5172 | 147 |
| 296 | LSNHGPI | 5173 | CTGAGTAATCATGGGCCTATT | 5174 | 286 |
| 297 | VLNDNLA | 5175 | GTGTTAAACGACAACTTAGCT | 5176 | 280 |
| 298 | RHVHVEG | 5177 | CGCCACGTACACGTCGAAGGC | 5178 | 236 |
| 299 | DGRAELR | 5179 | GATGGGCGGGCGGAGTTGCGT | 5180 | 333 |
| 300 | SGISFLA | 5181 | AGCGGAATCAGCTTCTTGGCT | 5182 | 154 |
| 301 | RISPEGT | 5183 | CGTATATCACCGGAAGGCACT | 5184 | 295 |
| 302 | RVTPTNT | 5185 | CGCGTGACGCCAACTAACACT | 5186 | 77 |
| 303 | STTSSPS | 5187 | TCGACCACCTCATCCCCTAGC | 5188 | 117 |
| 304 | LLHGIIA | 5189 | CTTTTACACGGAATAATCGCC | 5190 | 298 |
| 305 | ASESSPP | 5191 | GCATCAGAATCATCACCACCC | 5192 | 139 |
| 306 | TSREEQW | 5193 | ACTTCTCGTGAGGAGCAGTGG | 5194 | 343 |
| 307 | AGDRDQY | 5195 | GCTGGTGATCGGGATCAGTAT | 5196 | 251 |
| 308 | GVAIALQ | 5197 | GGGGTTGCTATTGCTCTTCAG | 5198 | 307 |
| 309 | LLGGTLA | 5199 | TTGTTGGGGGGTACTCTGGCT | 5200 | 298 |
| 310 | ALKEYES | 5201 | GCGCTGAAGGAGTATGAGTCG | 5202 | 277 |
| 311 | RGGKEEM | 5203 | CGAGGTGGCAAAGAAGAAATG | 5204 | 310 |
| 312 | VDFGDHT | 5205 | GTAGACTTCGGCGACCACACC | 5206 | 312 |
| 313 | GADVNNH | 5207 | GGTGCTGACGTCAACAACCAC | 5208 | 62 |
| 314 | MNGGNVL | 5209 | ATGAACGGCGGCAACGTGCTC | 5210 | 268 |
| 315 | HQGDTIV | 5211 | CATCAGGGGGATACGATTGTG | 5212 | 275 |
| 316 | SHGSDSR | 5213 | AGCCACGGGTCGGACTCCCGG | 5214 | 174 |
| 317 | TGHEGGS | 5215 | ACAGGCCACGAAGGAGGTTCG | 5216 | 327 |
| 318 | PNERHTL | 5217 | CCTAACGAACGCCACACCTTG | 5218 | 144 |
| 319 | TDALLMH | 5219 | ACAGACGCACTCCTCATGCAC | 5220 | 157 |
| 320 | SVTERSG | 5221 | TCTGTGACGGAGAGGAGTGGT | 5222 | 319 |
| 321 | LGHANGL | 5223 | TTAGGGCACGCAAACGGACTT | 5224 | 171 |
| 322 | GVSDFQS | 5225 | GGGGTATCGGACTTCCAATCA | 5226 | 330 |
| 323 | GVANVSP | 5227 | GGAGTTGCTAACGTCAGCCCA | 5228 | 197 |
| 324 | ATLLPQT | 5229 | GCCACACTTCTGCCACAAACG | 5230 | 122 |
| 325 | SSLLTTA | 5231 | TCGTCGTTGCTGACTACTGCT | 5232 | 115 |
| 326 | LNGAPLL | 5233 | CTGAATGGTGCGCCGTTGCTG | 5234 | 268 |
| 327 | SGSIVVV | 5235 | AGTGGTTCGATTGTGGTGGTT | 5236 | 114 |
| 328 | DVAISMR | 5237 | GACGTAGCGATATCCATGCGA | 5238 | 297 |
| 329 | LLADERV | 5239 | TTACTCGCAGACGAAAGGGTC | 5240 | 296 |
| 330 | LTSGLAA | 5241 | TTGACGTCTGGTTTGGCGGCG | 5242 | 112 |
| 331 | GPLNQSL | 5243 | GGTCCGCTGAATCAGTCTTTG | 5244 | 224 |
| 332 | EGSEHVK | 5245 | GAAGGGTCCGAACACGTGAAA | 5246 | 35 |
| 333 | RQDNSDV | 5247 | CGGCAGGATAATTCGGATGTG | 5248 | 159 |
| 334 | LGAGSLS | 5249 | TTGGGGGCGGGGAGTCTGTCT | 5250 | 110 |
| 335 | KLAEGVR | 5251 | AAACTAGCCGAAGGAGTGCGG | 5252 | 44 |
| 336 | HGTLESQ | 5253 | CACGGCACCCTCGAATCGCAA | 5254 | 178 |
| 337 | LDTSDRL | 5255 | TTGGACACGTCTGACCGGCTC | 5256 | 248 |
| 338 | VRGEETV | 5257 | GTTCGTGGGGAAGAAACCGTC | 5258 | 185 |
| 339 | VVLSLAT | 5259 | GTTGTCTTAAGTCTAGCCACT | 5260 | 109 |
| 340 | RDDQGIP | 5261 | CGGGATGATCAGGGGATTCCG | 5262 | 163 |
| 341 | AVAGTNS | 5263 | GCAGTTGCGGGTACAAACTCG | 5264 | 108 |
| 342 | RGGVTTE | 5265 | CGTGGAGGCGTAACCACCGAA | 5266 | 250 |
| 343 | RMTLTGD | 5267 | CGTATGACTTTGACTGGTGAT | 5268 | 247 |
| 344 | DDAVSKR | 5269 | GATGATGCTGTTTCTAAGCGT | 5270 | 143 |
| 345 | VNHGGVD | 5271 | GTAAACCACGGAGGAGTTGAC | 5272 | 274 |
| 346 | PGEPLRL | 5273 | CCGGGAGAACCCTTGCGACTC | 5274 | 279 |
| 347 | PGEHYEA | 5275 | CCGGGTGAGCATTATGAGGCT | 5276 | 196 |
| 348 | PSQGMTR | 5277 | CCTAGTCAGGGTATGACTCGT | 5278 | 128 |
| 349 | RASADVV | 5279 | AGGGCGAGTGCGGATGTTGTG | 5280 | 209 |
| 350 | DAQSRLA | 5281 | GATGCTCAGTCGCGGTTGGCG | 5282 | 290 |
| 351 | DPSLGSP | 5283 | GATCCGTCTCTGGGTTCTCCG | 5284 | 37 |
| 352 | RNVSDMT | 5285 | CGAAACGTGTCGGACATGACC | 5286 | 347 |
| 353 | VQSADPR | 5287 | GTCCAATCCGCGGACCCTCGC | 5288 | 27 |
| 354 | GVSTLSL | 5289 | GGGGTTTCTACTCTGAGTCTT | 5290 | 106 |
| 355 | REQQKAW | 5291 | CGAGAACAACAAAAAGCCTGG | 5292 | 169 |
| 356 | DTASTQS | 5293 | GACACAGCATCTACTCAATCC | 5294 | 105 |
| 357 | MSDSGTV | 5295 | ATGAGCGACTCGGGCACGGTT | 5296 | 286 |
| 358 | DSRTVDS | 5297 | GACTCTCGAACCGTCGACTCA | 5298 | 105 |
| 359 | NSGPQLS | 5299 | AACTCGGGCCCACAACTTTCG | 5300 | 203 |
| 360 | QKDSLVA | 5301 | CAGAAGGATTCGTTGGTTGCT | 5302 | 284 |
| 361 | TLATQEL | 5303 | ACTCTGGCGACGCAGGAGCTG | 5304 | 103 |
| 362 | QSMTDGV | 5305 | CAGAGTATGACTGATGGGGTT | 5306 | 151 |
| 363 | VTVAGSV | 5307 | GTTACGGTGGCTGGTTCGGTG | 5308 | 101 |
| 364 | SVVGLDS | 5309 | TCAGTCGTCGGATTAGACTCG | 5310 | 282 |
| 365 | MNGGHLM | 5311 | ATGAATGGGGGTCATCTTATG | 5312 | 268 |
| 366 | DKVVDEV | 5313 | GATAAGGTGGTTGATGAGGTG | 5314 | 226 |
| 367 | VVGTQDR | 5315 | GTTGTGGGGACTCAGGATAGG | 5316 | 211 |
| 368 | DVAVYIR | 5317 | GATGTTGCTGTTTATATTCGT | 5318 | 143 |
| 369 | EPSLGSR | 5319 | GAGCCGTCTCTGGGTTCTCGG | 5320 | 182 |
| 370 | ASVSALL | 5321 | GCGAGTGTTTCTGCGTTGTTG | 5322 | 100 |
| 371 | LSLDRPS | 5323 | CTAAGTCTAGACCGACCCTCG | 5324 | 327 |
| 372 | PAIQGNF | 5325 | CCAGCCATCCAAGGAAACTTC | 5326 | 135 |
| 373 | SVEPLSL | 5327 | TCCGTAGAACCTCTATCCCTC | 5328 | 279 |
| 374 | KSSDTPM | 5329 | AAGAGTTCTGATACTCCTATG | 5330 | 278 |
| 375 | SFDTYGA | 5331 | TCCTTCGACACTTACGGGGCC | 5332 | 62 |
| 376 | AVSDYAV | 5333 | GCAGTATCTGACTACGCAGTC | 5334 | 330 |
| 377 | AGVSASL | 5335 | GCGGGTGTTTCTGCGTCGTTG | 5336 | 99 |
| 378 | VVSQLPV | 5337 | GTCGTCTCTCAACTACCGGTA | 5338 | 276 |
| 379 | EIVLTVP | 5339 | GAGATTGTTTTGACTGTGCCG | 5340 | 120 |
| 380 | MIGGHVQ | 5341 | ATGATTGGGGGTCATGTTCAG | 5342 | 268 |
| 381 | TGLGLMV | 5343 | ACCGGACTCGGACTAATGGTA | 5344 | 323 |
| 382 | VTTHSPV | 5345 | GTTACCACCCACAGTCCAGTT | 5346 | 67 |
| 383 | VLPHANT | 5347 | GTCCTACCACACGCCAACACA | 5348 | 87 |
| 384 | STVLVPK | 5349 | TCTACCGTACTAGTCCCTAAA | 5350 | 244 |
| 385 | GGDALNQ | 5351 | GGGGGGGACGCCCTTAACCAA | 5352 | 31 |
| 386 | QIHDTAL | 5353 | CAAATCCACGACACAGCGCTC | 5354 | 318 |
| 387 | ALTNGQR | 5355 | GCACTAACCAACGGTCAACGT | 5356 | 60 |
| 388 | PARYRLW | 5357 | CCGGCGCGGTATCGGCTTTGG | 5358 | 35 |
| 389 | RNEGINQ | 5359 | CGTAATGAGGGTATTAATCAG | 5360 | 252 |
| 390 | QRSDSVM | 5361 | CAGCGGTCGGATAGTGTGATG | 5362 | 275 |
| 391 | NRQENSY | 5363 | AATCGGCAGGAGAATTCGTAT | 5364 | 349 |
| 392 | NDRNTSS | 5365 | AATGATAGGAATACGTCTTCG | 5366 | 242 |
| 393 | MNGGHVL | 5367 | ATGAATGGGGGTCATGTTCTG | 5368 | 268 |
| 394 | IPATADK | 5369 | ATCCCAGCCACGGCGGACAAA | 5370 | 140 |
| 395 | YAGIAQG | 5371 | TATGCGGGGATTGCTCAGGGT | 5372 | 269 |
| 396 | STQGGLA | 5373 | AGTACCCAAGGCGGATTAGCG | 5374 | 274 |
| 397 | GLLKNLD | 5375 | GGTTTGCTAAAAAACCTCGAC | 5376 | 349 |
| 398 | GLVQMSS | 5377 | GGTCTGGTGCAGATGTCTTCT | 5378 | 326 |
| 399 | GVSVPNV | 5379 | GGGGTGAGTGTGCCGAATGTT | 5380 | 132 |
| 400 | TTSRPEE | 5381 | ACTACTTCTCGGCCGGAGGAG | 5382 | 292 |
| 401 | RDMGALV | 5383 | CGGGATATGGGTGCTCTTGTG | 5384 | 231 |
| 402 | VHASSPT | 5385 | GTGCATGCTTCTAGTCCGACT | 5386 | 325 |
| 403 | REQQKYW | 5387 | CGGGAACAACAAAAATACTGG | 5388 | 169 |
| 404 | CNAAGCP | 5389 | TGTAATGCTGCGGGGTGTCCG | 5390 | 17 |
| 405 | PMRPGVA | 5391 | CCGATGCGGCCGGGTGTGGCT | 5392 | 200 |
| 406 | FGGVINA | 5393 | TTCGGGGGAGTAATAAACGCT | 5394 | 195 |
| 407 | STFSTVM | 5395 | AGCACATTCTCCACTGTTATG | 5396 | 98 |
| 408 | GHQNGGI | 5397 | GGGCACCAAAACGGCGGAATC | 5398 | 265 |
| 409 | MTSGNLM | 5399 | ATGACCTCTGGCAACCTCATG | 5400 | 280 |
| 410 | RESANAD | 5401 | CGTGAGTCTGCGAATGCTGAT | 5402 | 233 |
| 411 | SGDVARH | 5403 | TCAGGCGACGTTGCCCGACAC | 5404 | 17 |
| 412 | VSANVTI | 5405 | GTTTCTGCGAATGTTACGATT | 5406 | 97 |
| 413 | VPGSTTT | 5407 | GTTCCAGGCTCAACGACTACC | 5408 | 267 |
| 414 | PLVPQGG | 5409 | CCCTTAGTACCTCAAGGCGGT | 5410 | 34 |
| 415 | PGDRDQY | 5411 | CCAGGCGACCGAGACCAATAC | 5412 | 251 |
| 416 | HVSGASL | 5413 | CACGTGTCCGGCGCCAGCTTA | 5414 | 266 |
| 417 | YTSGTGT | 5415 | TACACCTCGGGCACAGGGACA | 5416 | 29 |
| 418 | PNTRDPI | 5417 | CCTAATACGCGGGATCCGATT | 5418 | 144 |
| 419 | SPVGIIA | 5419 | TCTCCTGTGGGTATTATTGCG | 5420 | 7 |
| 420 | LGDSDET | 5421 | TTAGGAGACTCGGACGAAACC | 5422 | 219 |
| 421 | NRHETLS | 5423 | AACCGCCACGAAACACTATCA | 5424 | 349 |
| 422 | GSVSSTK | 5425 | GGCTCCGTCAGTTCTACGAAA | 5426 | 96 |
| 423 | VFTGTDP | 5427 | GTGTTCACCGGCACAGACCCT | 5428 | 129 |
| 424 | YGSNVLS | 5429 | TACGGTTCTAACGTCCTCTCA | 5430 | 110 |
| 425 | TDNGALS | 5431 | ACTGATAATGGTGCGTTGTCG | 5432 | 110 |
| 426 | TGLGDRA | 5433 | ACCGGCTTGGGAGACAGGGCT | 5434 | 273 |
| 427 | DPSLGYP | 5435 | GACCCCAGTTTGGGCTACCCT | 5436 | 37 |
| 428 | LSLTEGV | 5437 | CTGAGTTTGACTGAGGGGGTT | 5438 | 259 |
| 429 | ARVLEKT | 5439 | GCCCGAGTCCTTGAAAAAACC | 5440 | 122 |
| 430 | VDTSARD | 5441 | GTTGATACTAGTGCTCGTGAT | 5442 | 248 |
| 431 | PTQETLR | 5443 | CCTACTCAGGAGACGCTTCGG | 5444 | 128 |
| 432 | AALTREI | 5445 | GCTGCTCTTACGCGGGAGATT | 5446 | 258 |
| 433 | RDLTNDV | 5447 | CGCGACTTAACTAACGACGTT | 5448 | 159 |
| 434 | GLSERAQ | 5449 | GGCCTGTCCGAACGAGCACAA | 5450 | 205 |
| 435 | DSLLPQT | 5451 | GATTCTCTGCTTCCTCAGACT | 5452 | 292 |
| 436 | LEANVSH | 5453 | CTTGAGGCGAATGTTTCGCAT | 5454 | 19 |
| 437 | AGSTVTW | 5455 | GCGGGGTCGACTGTTACTTGG | 5456 | 114 |
| 438 | YGVTLST | 5457 | TACGGCGTAACCCTCTCTACC | 5458 | 13 |
| 439 | GPSGAGI | 5459 | GGGCCATCAGGGGCAGGCATC | 5460 | 30 |
| 440 | VSNGHFV | 5461 | GTTAGTAATGGGCATTTTGTT | 5462 | 268 |
| 441 | GVSLPMS | 5463 | GGCGTATCACTACCCATGAGC | 5464 | 307 |
| 442 | MAASVTL | 5465 | ATGGCGGCTAGTGTTACGCTT | 5466 | 95 |
| 443 | KIGENAS | 5467 | AAGATTGGTGAGAATGCTTCT | 5468 | 321 |
| 444 | ISMTLLP | 5469 | ATTTCGATGACTCTGCTGCCG | 5470 | 184 |
| 445 | GAVSSTK | 5471 | GGTGCTGTTTCTTCGACTAAG | 5472 | 92 |
| 446 | TTLAHPA | 5473 | ACTACTCTGGCTCATCCTGCG | 5474 | 244 |
| 447 | LMNDLLS | 5475 | CTTATGAACGACTTACTCTCC | 5476 | 175 |
| 448 | TTAANVR | 5477 | ACGACGGCGGCTAATGTTAGG | 5478 | 91 |
| 449 | PNDRLTV | 5479 | CCAAACGACCGGTTGACGGTT | 5480 | 144 |
| 450 | LQVEQVM | 5481 | CTTCAGGTTGAGCAGGTTATG | 5482 | 329 |
| 451 | MLMGAET | 5483 | ATGCTCATGGGGGCAGAAACT | 5484 | 257 |
| 452 | LSLTMPA | 5485 | CTCTCGCTTACAATGCCTGCC | 5486 | 207 |
| 453 | KEIHVSV | 5487 | AAGGAGATTCATGTGTCGGTT | 5488 | 69 |
| 454 | MAVDVTK | 5489 | ATGGCAGTCGACGTAACCAAA | 5490 | 256 |
| 455 | NSLATMV | 5491 | AATAGTCTGGCGACGATGGTG | 5492 | 89 |
| 456 | RSISGDW | 5493 | CGTTCCATAAGTGGCGACTGG | 5494 | 159 |
| 457 | SLQQANT | 5495 | TCGCTTCAGCAGGCTAATACG | 5496 | 87 |
| 458 | PTTNPLL | 5497 | CCGACTACTAATCCGCTTCTG | 5498 | 56 |
| 459 | ADVLIRG | 5499 | GCGGACGTGCTCATACGCGGT | 5500 | 269 |
| 460 | HVASAGA | 5501 | CATGTTGCTTCGGCGGGGGCG | 5502 | 253 |
| 461 | LQDRTTL | 5503 | CTCCAAGACCGCACTACTCTC | 5504 | 204 |
| 462 | NAHDTET | 5505 | AATGCGCATGATACTGAGACT | 5506 | 246 |
| 463 | RVDSALL | 5507 | AGAGTAGACAGCGCTCTTTTA | 5508 | 86 |
| 464 | RNQGSES | 5509 | CGTAATCAGGGTAGTGAGAGT | 5510 | 252 |
| 465 | EIMSSNR | 5511 | GAAATCATGTCGTCCAACCGT | 5512 | 249 |
| 466 | GSRENAR | 5513 | GGGAGTAGGGAGAATGCGCGT | 5514 | 70 |
| 467 | GGDTSRS | 5515 | GGGGGTGATACGAGTCGTAGT | 5516 | 335 |
| 468 | YLALTGI | 5517 | TATCTTGCGCTTACGGGGATT | 5518 | 78 |
| 469 | LDTSARL | 5519 | CTTGATACTAGTGCTCGTCTT | 5520 | 248 |
| 470 | LLTLTQA | 5521 | CTGCTCACCCTGACTCAAGCG | 5522 | 247 |
| 471 | SEQNKVW | 5523 | TCCGAACAAAACAAAGTATGG | 5524 | 94 |
| 472 | ADAAHAL | 5525 | GCGGACGCAGCCCACGCGCTC | 5526 | 245 |
| 473 | GVAATNS | 5527 | GGGGTGGCTGCGACGAATTCT | 5528 | 84 |
| 474 | NSGSMHT | 5529 | AACTCAGGAAGCATGCACACT | 5530 | 293 |
| 475 | PDGAAPM | 5531 | CCTGATGGTGCGGCTCCTATG | 5532 | 341 |
| 476 | STLASPR | 5533 | TCAACCCTAGCCTCGCCTCGA | 5534 | 244 |
| 477 | GADDAAL | 5535 | GGAGCCGACGACGCAGCCCTC | 5536 | 315 |
| 478 | AGASAEA | 5537 | GCTGGGGCTAGTGCTGAGGCG | 5538 | 228 |
| 479 | SRLEYIG | 5539 | AGCCGCCTTGAATACATCGGG | 5540 | 349 |
| 480 | YTVGSLA | 5541 | TACACCGTTGGCTCACTCGCC | 5542 | 314 |
| 481 | LVHLGTS | 5543 | TTGGTTCATCTTGGGACTTCT | 5544 | 198 |
| 482 | GLYDAAT | 5545 | GGGCTTTATGATGCGGCGACT | 5546 | 315 |
| 483 | KNGGHDL | 5547 | AAAAACGGTGGGCACGACCTA | 5548 | 268 |
| 484 | NTENASR | 5549 | AATACTGAGAATGCGTCGCGG | 5550 | 242 |
| 485 | HGTLVSQ | 5551 | CATGGGACTTTGGTGTCTCAG | 5552 | 178 |
| 486 | HAGLGVT | 5553 | CATGCTGGTCTTGGTGTTACT | 5554 | 163 |
| 487 | PSYQGNG | 5555 | CCGAGTTATCAGGGGAATGGT | 5556 | 181 |
| 488 | MGDNYAR | 5557 | ATGGGTGATAATTATGCTCGG | 5558 | 10 |
| 489 | LEKDPMT | 5559 | TTGGAAAAAGACCCTATGACT | 5560 | 318 |
| 490 | SMNGTSL | 5561 | AGTATGAATGGGACTAGTCTT | 5562 | 81 |
| 491 | SNLGNTS | 5563 | AGTAACCTTGGAAACACCTCG | 5564 | 241 |
| 492 | GSGAGLH | 5565 | GGAAGTGGAGCTGGCCTTCAC | 5566 | 172 |
| 493 | LANTVVT | 5567 | CTTGCTAATACGGTTGTGACG | 5568 | 80 |
| 494 | AVRENGI | 5569 | GCCGTTCGGGAAAACGGCATA | 5570 | 34 |
| 495 | VTELTRF | 5571 | GTGACTGAGCTTACGCGGTTT | 5572 | 162 |
| 496 | RNLDLNH | 5573 | AGGAATCTTGATCTGAATCAT | 5574 | 261 |
| 497 | ALASTQT | 5575 | GCACTAGCATCGACCCAAACT | 5576 | 79 |
| 498 | FISGALT | 5577 | TTCATATCCGGCGCCTTAACT | 5578 | 240 |
| 499 | QSQTAVA | 5579 | CAGTCTCAGACGGCTGTTGCT | 5580 | 1 |
| 500 | VSSQLPM | 5581 | GTGTCGTCTCAGTTGCCGATG | 5582 | 239 |
| 501 | VIALTEA | 5583 | GTGATTGCGTTGACGGAGGCT | 5584 | 78 |
| 502 | TTVEVSG | 5585 | ACAACCGTAGAAGTAAGCGGC | 5586 | 236 |
| 503 | GVAGTNS | 5587 | GGAGTTGCGGGAACAAACTCC | 5588 | 84 |
| 504 | RESGEQA | 5589 | AGGGAGAGTGGGGAGCAGGCT | 5590 | 233 |
| 505 | HIVLSHA | 5591 | CATATTGTGCTGAGTCATGCT | 5592 | 78 |
| 506 | ILGVYSD | 5593 | ATACTGGGCGTTTACTCCGAC | 5594 | 287 |
| 507 | QGGTTLR | 5595 | CAAGGGGGGACTACTCTACGC | 5596 | 49 |
| 508 | YHTEKMF | 5597 | TACCACACCGAAAAAATGTTC | 5598 | 320 |
| 509 | LEVGALR | 5599 | CTGGAAGTAGGCGCACTTCGT | 5600 | 231 |
| 510 | GFGLTED | 5601 | GGGTTTGGGTTGACGGAGGAT | 5602 | 322 |
| 511 | PLKGGGE | 5603 | CCGTTGAAAGGCGGGGGTGAA | 5604 | 328 |
| 512 | GLVHMPS | 5605 | GGCTTAGTTCACATGCCCTCA | 5606 | 326 |
| 513 | VTGHPTL | 5607 | GTTACGGGTCATCCGACTCTT | 5608 | 0 |
| 514 | WNHSTTV | 5609 | TGGAACCACTCCACGACAGTC | 5610 | 2 |
| 515 | PGEHYRL | 5611 | CCTGGAGAACACTACAGATTG | 5612 | 196 |
| 516 | LSLTDLV | 5613 | CTGAGTTTGACTGATTTGGTT | 5614 | 230 |
| 517 | GTGSTNV | 5615 | GGAACTGGATCGACAAACGTT | 5616 | 229 |
| 518 | LSKEHAP | 5617 | TTGAGTAAGGAGCATGCTCCT | 5618 | 57 |
| 519 | LGDSAEA | 5619 | CTTGGGGATTCTGCTGAGGCG | 5620 | 228 |
| 520 | GPRNSID | 5621 | GGCCCACGTAACTCTATCGAC | 5622 | 343 |
| 521 | LVRGLTT | 5623 | TTGGTTCGTGGTCTTACGACT | 5624 | 222 |
| 522 | REVSPLM | 5625 | CGAGAAGTAAGCCCCCTGATG | 5626 | 215 |
| 523 | IMPSVTK | 5627 | ATAATGCCCTCTGTTACAAAA | 5628 | 136 |
| 524 | WNSEVSV | 5629 | TGGAACAGTGAAGTTTCGGTG | 5630 | 320 |
| 525 | FHGSDSK | 5631 | TTTCATGGTTCTGATTCGAAG | 5632 | 174 |
| 526 | PNERLTQ | 5633 | CCGAATGAGAGGCTTACTCAG | 5634 | 144 |
| 527 | GQEETGW | 5635 | GGGCAGGAGGAGACCGGCTGG | 5636 | 169 |
| 528 | MVTTTNT | 5637 | ATGGTGACGACCACAAACACC | 5638 | 77 |
| 529 | NALGDGY | 5639 | AACGCGCTGGGCGACGGCTAC | 5640 | 312 |
| 530 | LGDSAET | 5641 | CTTGGGGATTCTGCTGAGACG | 5642 | 219 |
| 531 | TGAHTEV | 5643 | ACCGGAGCACACACCGAAGTC | 5644 | 82 |
| 532 | LVGNPST | 5645 | CTCGTGGGCAACCCGAGTACG | 5646 | 287 |
| 533 | FPSMSGK | 5647 | TTCCCAAGCATGTCGGGGAAA | 5648 | 62 |
| 534 | KGSDTPL | 5649 | AAGGGTTCTGATACTCCTTTG | 5650 | 278 |
| 535 | ANLGESV | 5651 | GCCAACCTCGGTGAATCCGTG | 5652 | 218 |
| 536 | SVDSGLR | 5653 | AGTGTTGATAGTGGGCTGCGT | 5654 | 217 |
| 537 | RTMGDST | 5655 | CGGACAATGGGTGACAGTACG | 5656 | 312 |
| 538 | SLAISQR | 5657 | AGCCTGGCTATAAGCCAACGT | 5658 | 76 |
| 539 | SEISLSR | 5659 | TCTGAGATTAGTCTGTCTCGG | 5660 | 75 |
| 540 | LRGTENQ | 5661 | TTGCGTGGGACGGAGAATCAG | 5662 | 237 |
| 541 | SGHVTAL | 5663 | AGTGGACACGTCACAGCTTTA | 5664 | 114 |
| 542 | REISILS | 5665 | CGCGAAATATCGATACTATCT | 5666 | 215 |
| 543 | ASTDFKM | 5667 | GCTAGTACTGATTTTAAGATG | 5668 | 330 |
| 544 | GNSGDHF | 5669 | GGTAACTCTGGTGACCACTTC | 5670 | 149 |
| 545 | AADSSVR | 5671 | GCTGCTGACAGCAGCGTTAGA | 5672 | 73 |
| 546 | QADSHGR | 5673 | CAAGCCGACTCGCACGGCCGT | 5674 | 62 |
| 547 | ADYGTSS | 5675 | GCGGACTACGGTACCAGCTCT | 5676 | 108 |
| 548 | SGGVESK | 5677 | TCTGGTGGTGTTGAGTCGAAG | 5678 | 310 |
| 549 | GNLLLTA | 5679 | GGTAATTTGCTGCTTACTGCT | 5680 | 115 |
| 550 | MTDRHRV | 5681 | ATGACCGACCGTCACAGGGTC | 5682 | 187 |
| 551 | MENAPGR | 5683 | ATGGAGAATGCTCCTGGGAGG | 5684 | 62 |
| 552 | EANHTGY | 5685 | GAAGCCAACCACACCGGATAC | 5686 | 254 |
| 553 | AADRSVR | 5687 | GCAGCAGACCGCTCCGTACGT | 5688 | 72 |
| 554 | PIIEHAV | 5689 | CCCATAATAGAACACGCAGTA | 5690 | 330 |
| 555 | NVDTSVR | 5691 | AATGTTGATACGAGTGTGCGG | 5692 | 213 |
| 556 | NVTATLG | 5693 | AACGTCACAGCAACGCTGGGT | 5694 | 203 |
| 557 | MKTQIEL | 5695 | ATGAAAACGCAAATAGAACTC | 5696 | 126 |
| 558 | IGPRREV | 5697 | ATAGGACCTCGCCGTGAAGTA | 5698 | 82 |
| 559 | VLAAVDR | 5699 | GTCCTTGCTGCCGTCGACCGA | 5700 | 211 |
| 560 | SVDSGLL | 5701 | AGTGTTGATAGTGGGCTGCTT | 5702 | 210 |
| 561 | FIVGNGS | 5703 | TTCATCGTAGGCAACGGAAGT | 5704 | 22 |
| 562 | RYNVETA | 5705 | CGGTATAATGTTGAGACTGCG | 5706 | 333 |
| 563 | AIVSIAQ | 5707 | GCGATTGTGTCGATTGCTCAG | 5708 | 71 |
| 564 | PDNNPRN | 5709 | CCTGATAATAATCCGCGGAAT | 5710 | 19 |
| 565 | KTVNVSV | 5711 | AAGACTGTGAATGTTAGTGTT | 5712 | 69 |
| 566 | QFHENIR | 5713 | CAGTTTCATGAGAATATTCGT | 5714 | 153 |
| 567 | KGYDTPM | 5715 | AAAGGCTACGACACACCCATG | 5716 | 278 |
| 568 | AVITEPK | 5717 | GCGGTGATTACTGAGCCTAAG | 5718 | 207 |
| 569 | VSSTGEW | 5719 | GTTAGTTCTACGGGGGAGTGG | 5720 | 198 |
| 570 | TGSIPSP | 5721 | ACCGGTTCAATCCCTTCCCCC | 5722 | 184 |
| 571 | NQSAELV | 5723 | AATCAGTCGGCGGAGCTGGTT | 5724 | 209 |
| 572 | VIGGLGI | 5725 | GTTATTGGTGGGCTTGGGATT | 5726 | 212 |
| 573 | HFSSETS | 5727 | CACTTCTCTTCCGAAACTTCT | 5728 | 65 |
| 574 | GYRGVVD | 5729 | GGTTATAGGGGGGTTGTGGAT | 5730 | 149 |
| 575 | SHGTDTK | 5731 | AGCCACGGAACGGACACCAAA | 5732 | 174 |
| 576 | VMASPGP | 5733 | GTTATGGCTTCGCCTGGTCCT | 5734 | 176 |
| 577 | LPNGGGL | 5735 | CTGCCGAATGGGGGGGGTTTG | 5736 | 30 |
| 578 | VGSVTDS | 5737 | GTTGGTAGCGTAACCGACTCC | 5738 | 206 |
| 579 | TVMTSEP | 5739 | ACAGTTATGACCAGCGAACCT | 5740 | 159 |
| 580 | PGNGTMV | 5741 | CCTGGTAACGGCACTATGGTG | 5742 | 128 |
| 581 | SLGALVA | 5743 | TCGCTGGGTGCTCTGGTTGCT | 5744 | 68 |
| 582 | YLVTADN | 5745 | TATTTGGTTACTGCTGATAAT | 5746 | 45 |
| 583 | LTHLRVS | 5747 | CTGACTCACCTTCGTGTCAGC | 5748 | 305 |
| 584 | HTVGSYV | 5749 | CATACGGTTGGGAGTTATGTT | 5750 | 216 |
| 585 | LEDRSAS | 5751 | TTGGAGGATCGGTCGGCTAGT | 5752 | 204 |
| 586 | VTTASPV | 5753 | GTGACTACGGCTTCTCCTGTG | 5754 | 67 |
| 587 | GVLGQTD | 5755 | GGTGTGTTGGGGCAGACTGAT | 5756 | 149 |
| 588 | DIDRLHK | 5757 | GATATTGATAGGCTGCATAAG | 5758 | 12 |
| 589 | HNPGMDK | 5759 | CATAATCCGGGGATGGATAAG | 5760 | 337 |
| 590 | TVGLTIA | 5761 | ACTGTGGGTTTGACGATTGCG | 5762 | 201 |
| 591 | SPPPNAR | 5763 | AGCCCGCCGCCGAACGCGCGT | 5764 | 183 |
| 592 | FLLGHTD | 5765 | TTCCTTCTGGGGCACACGGAC | 5766 | 119 |
| 593 | VLTSPGP | 5767 | GTGCTCACAAGCCCGGGACCG | 5768 | 176 |
| 594 | TAYDTLV | 5769 | ACGGCGTATGATACGTTGGTT | 5770 | 339 |
| 595 | SVETGVL | 5771 | TCTGTGGAAACTGGCGTCTTA | 5772 | 200 |
| 596 | TVKEYEL | 5773 | ACCGTTAAAGAATACGAACTC | 5774 | 277 |
| 597 | MTVPGSP | 5775 | ATGACGGTTCCGGGTAGTCCG | 5776 | 101 |
| 598 | YYSITSS | 5777 | TACTACTCCATCACATCCAGT | 5778 | 88 |
| 599 | STIPTLK | 5779 | AGTACTATTCCTACTCTGAAG | 5780 | 332 |
| 600 | MVQSGLT | 5781 | ATGGTTCAGTCGGGGTTGACG | 5782 | 170 |
| 601 | MGVGGGS | 5783 | ATGGGGGTCGGTGGTGGATCC | 5784 | 110 |
| 602 | RVDSGQL | 5785 | AGGGTGGATTCGGGGCAGCTT | 5786 | 186 |
| 603 | REISNLR | 5787 | CGGGAAATAAGCAACCTACGT | 5788 | 188 |
| 604 | DHVLLTR | 5789 | GACCACGTGTTACTTACCCGG | 5790 | 75 |
| 605 | TRIGLSD | 5791 | ACACGAATAGGACTCAGTGAC | 5792 | 323 |
| 606 | RVHSAQL | 5793 | AGGGTGCATTCGGCGCAGCTT | 5794 | 302 |
| 607 | YEHSGLL | 5795 | TATGAGCATTCTGGTCTTTTG | 5796 | 170 |
| 608 | VFTGTDT | 5797 | GTGTTCACAGGAACCGACACA | 5798 | 129 |
| 609 | TLAINER | 5799 | ACTTTGGCGATTAATGAGCGG | 5800 | 85 |
| 610 | LGVTNVA | 5801 | CTAGGAGTGACCAACGTGGCC | 5802 | 340 |
| 611 | GVANVSQ | 5803 | GGTGTGGCGAATGTGAGTCAG | 5804 | 197 |
| 612 | ATVKDSG | 5805 | GCAACCGTAAAAGACTCGGGG | 5806 | 236 |
| 613 | GEIDIAF | 5807 | GGAGAAATCGACATAGCCTTC | 5808 | 75 |
| 614 | LSLTDGV | 5809 | TTGTCCTTAACCGACGGAGTG | 5810 | 259 |
| 615 | VLLMDRV | 5811 | GTACTTCTTATGGACCGAGTT | 5812 | 296 |
| 616 | SSADYQV | 5813 | AGTTCTGCGGATTATCAGGTT | 5814 | 330 |
| 617 | APRDPGV | 5815 | GCGCCGCGTGATCCTGGTGTT | 5816 | 327 |
| 618 | AQAQTGW | 5817 | GCTCAAGCACAGACCGGCTGG | 5818 | 169 |
| 619 | SNLHTST | 5819 | AGTAATCTTCATACTTCGACT | 5820 | 303 |
| 620 | RVDSGLL | 5821 | AGGGTTGATAGTGGGCTGCTT | 5822 | 86 |
| 621 | SGGRITD | 5823 | AGCGGAGGGCGCATCACCGAC | 5824 | 179 |
| 622 | LGIGQGP | 5825 | TTGGGTATTGGTCAGGGTCCT | 5826 | 184 |
| 623 | MGGVTSV | 5827 | ATGGGGGGGGTTACTTCGGTG | 5828 | 195 |
| 624 | SIYDNVK | 5829 | TCGATATACGACAACGTCAAA | 5830 | 339 |
| 625 | VTSDAGW | 5831 | GTCACCTCTGACGCAGGGTGG | 5832 | 309 |
| 626 | AHTEMSH | 5833 | GCCCACACCGAAATGTCTCAC | 5834 | 261 |
| 627 | LLTQDAR | 5835 | TTGCTTACTCAGGATGCTCGG | 5836 | 193 |
| 628 | YVGSPLV | 5837 | TATGTTGGTTCTCCGTTGGTG | 5838 | 111 |
| 629 | ENAGTDV | 5839 | GAAAACGCCGGAACTGACGTC | 5840 | 29 |
| 630 | SIYDNDT | 5841 | TCCATCTACGACAACGACACC | 5842 | 289 |
| 631 | AATSGGP | 5843 | GCAGCCACCAGTGGCGGGCCG | 5844 | 62 |
| 632 | STIPTLM | 5845 | TCGACGATACCAACCTTGATG | 5846 | 308 |
| 633 | SGMQAEA | 5847 | TCGGGTATGCAGGCGGAGGCT | 5848 | 192 |
| 634 | GNGDMFA | 5849 | GGGAATGGGGATATGTTTGCT | 5850 | 264 |
| 635 | LNGGIGV | 5851 | CTTAATGGGGGTATTGGGGTT | 5852 | 164 |
| 636 | TAVERAW | 5853 | ACGGCTGTTGAGCGGGCGTGG | 5854 | 205 |
| 637 | NNGIVIA | 5855 | AATAATGGGATTGTGATTGCG | 5856 | 305 |
| 638 | GPDTGAM | 5857 | GGCCCCGACACAGGCGCGATG | 5858 | 315 |
| 639 | PSRGIPL | 5859 | CCGAGTCGTGGTATTCCTCTT | 5860 | 341 |
| 640 | VGGAGEI | 5861 | GTTGGTGGGGCGGGTGAGATT | 5862 | 101 |
| 641 | VLQLAAL | 5863 | GTTCTTCAACTCGCTGCCCTC | 5864 | 66 |
| 642 | LSDGGPL | 5865 | CTCTCGGACGGAGGCCCCCTC | 5866 | 286 |
| 643 | VSGGVLD | 5867 | GTATCCGGCGGAGTACTAGAC | 5868 | 161 |
| 644 | MSITEPR | 5869 | ATGTCTATTACTGAGCCGCGG | 5870 | 207 |
| 645 | SGSNTGP | 5871 | AGCGGCTCCAACACTGGCCCG | 5872 | 184 |
| 646 | SLRDTHY | 5873 | AGTCTTCGGGATACTCATTAT | 5874 | 318 |
| 647 | MGDAGLR | 5875 | ATGGGGGATGCGGGGCTGCGG | 5876 | 217 |
| 648 | IVMSSHI | 5877 | ATCGTCATGAGCTCCCACATC | 5878 | 189 |
| 649 | ASPLPQT | 5879 | GCTAGTCCCTTGCCCCAAACC | 5880 | 122 |
| 650 | SEISILR | 5881 | AGTGAGATTAGTATTCTGCGG | 5882 | 188 |
| 651 | SEGLSRD | 5883 | TCGGAGGGTCTTTCGCGTGAT | 5884 | 306 |
| 652 | LGSLVVH | 5885 | CTGGGAAGCTTAGTCGTTCAC | 5886 | 114 |
| 653 | ETRLDSK | 5887 | GAAACCCGACTCGACTCGAAA | 5888 | 54 |
| 654 | ANQLAPV | 5889 | GCCAACCAATTGGCCCCCGTG | 5890 | 272 |
| 655 | LFGPSAY | 5891 | TTATTCGGACCTTCCGCCTAC | 5892 | 317 |
| 656 | SMTSESS | 5893 | TCAATGACTTCGGAATCGTCT | 5894 | 65 |
| 657 | MTDSGTV | 5895 | ATGACTGATAGTGGGACTGTG | 5896 | 187 |
| 658 | FQVEQIM | 5897 | TTTCAGGTTGAGCAGATTATG | 5898 | 329 |
| 659 | RVDSEQL | 5899 | AGGGTGGATTCGGAGCAGCTT | 5900 | 146 |
| 660 | SNTGVTV | 5901 | TCGAATACTGGTGTTACGGTG | 5902 | 180 |
| 661 | ITQAVYI | 5903 | ATCACACAAGCGGTATACATC | 5904 | 300 |
| 662 | GALSSTK | 5905 | GGTGCTCTTTCTTCGACTAAG | 5906 | 63 |
| 663 | IMVDAHS | 5907 | ATTATGGTTGATGCTCATTCG | 5908 | 175 |
| 664 | GSGVQPV | 5909 | GGGTCCGGCGTACAACCGGTA | 5910 | 264 |
| 665 | GSGPGVA | 5911 | GGTTCTGGGCCGGGGGTGGCT | 5912 | 163 |
| 666 | KHSSEMT | 5913 | AAACACAGCTCAGAAATGACC | 5914 | 346 |
| 667 | TRTEDYT | 5915 | ACGCGTACGGAGGATTATACT | 5916 | 349 |
| 668 | ILNPTAV | 5917 | ATTCTTAATCCGACGGCGGTG | 5918 | 5 |
| 669 | IGSSLSP | 5919 | ATTGGGTCGTCGCTTAGTCCT | 5920 | 184 |
| 670 | SGFVVPV | 5921 | TCTGGGTTTGTTGTGCCGGTG | 5922 | 114 |
| 671 | RTTPDVT | 5923 | CGCACGACCCCCGACGTAACA | 5924 | 107 |
| 672 | APTATLR | 5925 | GCGCCTACTGCTACTCTTCGG | 5926 | 183 |
| 673 | YDRIMSS | 5927 | TACGACCGCATAATGTCATCT | 5928 | 168 |
| 674 | YGSNDLS | 5929 | TATGGGAGTAATGATCTGAGT | 5930 | 110 |
| 675 | GDRGVVA | 5931 | GGTGATAGGGGGGTTGTGGCT | 5932 | 53 |
| 676 | QAALSDR | 5933 | CAAGCGGCACTATCAGACCGG | 5934 | 182 |
| 677 | AADSSGR | 5935 | GCGGCGGATAGTTCTGGGCGG | 5936 | 62 |
| 678 | PTLGTLR | 5937 | CCTACTCTGGGGACGCTTCGG | 5938 | 128 |
| 679 | PNLGNPS | 5939 | CCCAACCTCGGAAACCCATCT | 5940 | 241 |
| 680 | PTQGTNR | 5941 | CCAACACAAGGTACAAACAGG | 5942 | 128 |
| 681 | SRGVISS | 5943 | AGCCGAGGCGTAATCTCGTCA | 5944 | 310 |
| 682 | ASVSSLR | 5945 | GCTAGTGTGTCTTCGCTGCGT | 5946 | 61 |
| 683 | LRVTEDL | 5947 | TTGCGTGTGACGGAGGATCTG | 5948 | 237 |
| 684 | MTGLDDV | 5949 | ATGACGGGCCTAGACGACGTA | 5950 | 142 |
| 685 | TSLGPMV | 5951 | ACTTCGTTAGGCCCGATGGTC | 5952 | 323 |
| 686 | MAGGVQV | 5953 | ATGGCGGGTGGGGTGCAGGTT | 5954 | 177 |
| 687 | NGASLAS | 5955 | AACGGAGCTTCCCTCGCAAGC | 5956 | 59 |
| 688 | TNGVLYT | 5957 | ACAAACGGCGTCCTTTACACG | 5958 | 93 |
| 689 | MNGGHVQ | 5959 | ATGAACGGAGGGCACGTGCAA | 5960 | 268 |
| 690 | VMASTGP | 5961 | GTAATGGCGTCAACAGGACCG | 5962 | 176 |
| 691 | VLASLGD | 5963 | GTACTCGCGTCGTTGGGCGAC | 5964 | 212 |
| 692 | ILVDALA | 5965 | ATTCTGGTTGATGCTCTTGCG | 5966 | 175 |
| 693 | SADSSVR | 5967 | TCGGCGGATAGTTCTGTGCGG | 5968 | 58 |
| 694 | NRELALG | 5969 | AACCGCGAACTCGCACTCGGG | 5970 | 263 |
| 695 | SHASDSK | 5971 | TCGCACGCATCAGACTCTAAA | 5972 | 174 |
| 696 | AGHSNAV | 5973 | GCTGGGCATTCTAATGCGGTT | 5974 | 158 |
| 697 | MVTPTNS | 5975 | ATGGTGACGCCGACCAACAGT | 5976 | 77 |
| 698 | TIDRFGS | 5977 | ACAATAGACCGATTCGGAAGT | 5978 | 204 |
| 699 | RGAEVLL | 5979 | CGGGGTGCGGAGGTGCTGCTG | 5980 | 313 |
| 700 | TFAISDR | 5981 | ACTTTTGCGATTTCTGATCGG | 5982 | 262 |
| 701 | SQGSDSK | 5983 | AGTCAAGGCTCCGACTCAAAA | 5984 | 54 |
| 702 | ASGVRPV | 5985 | GCGTCAGGTGTTAGACCGGTA | 5986 | 272 |
| 703 | SDATGVL | 5987 | TCCGACGCTACCGGTGTGCTA | 5988 | 44 |
| 704 | LTLSNGV | 5989 | CTTACGCTGAGTAATGGGGTG | 5990 | 171 |
| 705 | DSDSGRR | 5991 | GATTCTGATAGTGGGCGGCGG | 5992 | 217 |
| 706 | LYTSDRV | 5993 | CTATACACATCTGACCGAGTG | 5994 | 248 |
| 707 | QDAHVAI | 5995 | CAGGATGCGCATGTGGCTATT | 5996 | 0 |
| 708 | IVDSGLL | 5997 | ATTGTTGATAGTGGGCTGCTT | 5998 | 170 |
| 709 | LYGGSSA | 5999 | CTCTACGGAGGGTCCTCGGCT | 6000 | 317 |
| 710 | NFGRDTL | 6001 | AATTTTGGTCGTGATACTCTG | 6002 | 174 |
| 711 | TPVYTVK | 6003 | ACCCCCGTCTACACCGTAAAA | 6004 | 145 |
| 712 | AAVVPRY | 6005 | GCAGCAGTAGTACCACGATAC | 6006 | 122 |
| 713 | SNVALTG | 6007 | AGCAACGTTGCACTGACCGGC | 6008 | 64 |
| 714 | ASMGTVA | 6009 | GCGTCCATGGGAACCGTAGCC | 6010 | 53 |
| 715 | TIGVVAN | 6011 | ACGATTGGGGTTGTGGCGAAT | 6012 | 137 |
| 716 | TSVLPQT | 6013 | ACGTCTGTGCTTCCTCAGACT | 6014 | 292 |
| 717 | LHAGESR | 6015 | CTTCATGCTGGTGAGTCTAGG | 6016 | 134 |
| 718 | STTSSPR | 6017 | TCTACGACGAGTTCGCCGCGT | 6018 | 52 |
| 719 | PGHGPVR | 6019 | CCCGGGCACGGACCTGTACGC | 6020 | 128 |
| 720 | FTSGTGN | 6021 | TTCACAAGCGGGACCGGAAAC | 6022 | 112 |
| 721 | QILGASS | 6023 | CAAATCTTAGGGGCCTCGAGT | 6024 | 51 |
| 722 | EVRDTKT | 6025 | GAAGTTCGGGACACAAAAACG | 6026 | 246 |
| 723 | VLPSPGP | 6027 | GTTCTGCCTTCGCCTGGTCCT | 6028 | 176 |
| 724 | INNFAPP | 6029 | ATAAACAACTTCGCACCGCCC | 6030 | 139 |
| 725 | ELRPQSS | 6031 | GAACTCCGGCCCCAATCATCT | 6032 | 65 |
| 726 | LTDKMTS | 6033 | TTGACTGATAAGATGACGTCG | 6034 | 334 |
| 727 | IYPQSST | 6035 | ATATACCCACAAAGCTCCACC | 6036 | 317 |
| 728 | VVSGLLH | 6037 | GTTGTCTCCGGGTTGCTACAC | 6038 | 238 |
| 729 | ATVAGQY | 6039 | GCTACCGTGGCAGGCCAATAC | 6040 | 101 |
| 730 | NLGGVQL | 6041 | AACTTAGGAGGCGTCCAATTG | 6042 | 177 |
| 731 | SEPSGTL | 6043 | AGCGAACCCTCCGGAACTTTA | 6044 | 25 |
| 732 | MNGGHVI | 6045 | ATGAATGGGGGTCATGTTATT | 6046 | 268 |
| 733 | VVNVGQT | 6047 | GTAGTGAACGTCGGACAAACT | 6048 | 198 |
| 734 | GLTEYTA | 6049 | GGTCTAACCGAATACACAGCT | 6050 | 331 |
| 735 | ILASPGP | 6051 | ATACTTGCGTCACCCGGACCG | 6052 | 176 |
| 736 | VGSVMAS | 6053 | GTGGGGTCGGTTATGGCTAGT | 6054 | 168 |
| 737 | SPQGVLA | 6055 | TCGCCGCAGGGGGTTCTTGCT | 6056 | 274 |
| 738 | VGPSVLQ | 6057 | GTAGGTCCATCCGTACTACAA | 6058 | 161 |
| 739 | GVRDTNI | 6059 | GGAGTTCGAGACACAAACATA | 6060 | 132 |
| 740 | ALQSAQV | 6061 | GCACTACAATCTGCACAAGTT | 6062 | 50 |
| 741 | GGVSATA | 6063 | GGAGGAGTCAGCGCAACGGCT | 6064 | 165 |
| 742 | NPSPTET | 6065 | AACCCTAGCCCGACCGAAACC | 6066 | 311 |
| 743 | AIVSIAR | 6067 | GCGATTGTGTCGATTGCTCGG | 6068 | 48 |
| 744 | AVPREGM | 6069 | GCCGTCCCGCGCGAAGGAATG | 6070 | 34 |
| 745 | PGAHYQA | 6071 | CCGGGTGCGCATTATCAGGCT | 6072 | 196 |
| 746 | SPPSSQR | 6073 | TCACCCCCTTCATCCCAACGC | 6074 | 58 |
| 747 | RSNTGEW | 6075 | CGGTCAAACACCGGCGAATGG | 6076 | 163 |
| 748 | HLYTGTG | 6077 | CACTTATACACTGGCACCGGA | 6078 | 44 |
| 749 | NGPMKAD | 6079 | AACGGTCCAATGAAAGCAGAC | 6080 | 59 |
| 750 | AADTSVR | 6081 | GCGGCGGATACTTCTGTGCGG | 6082 | 47 |
| 751 | GLEKMTS | 6083 | GGTCTGGAGAAGATGACTTCT | 6084 | 326 |
| 752 | IIISSAN | 6085 | ATAATCATATCCTCGGCCAAC | 6086 | 45 |
| 753 | GLVKMPT | 6087 | GGTCTGGTGAAGATGCCTACT | 6088 | 326 |
| 754 | SLPPYGR | 6089 | AGCCTGCCCCCCTACGGCCGT | 6090 | 279 |
| 755 | TSLGLMQ | 6091 | ACTAGCCTTGGCTTAATGCAA | 6092 | 323 |
| 756 | LSRGAEN | 6093 | CTTTCGAGGGGTGCGGAGAAT | 6094 | 324 |
| 757 | AVKEYEL | 6095 | GCCGTTAAAGAATACGAACTC | 6096 | 277 |
| 758 | TTPSPRT | 6097 | ACGACCCCTAGCCCACGAACA | 6098 | 292 |
| 759 | HGTLVSK | 6099 | CACGGCACCCTTGTTTCCAAA | 6100 | 178 |
| 760 | VTELTQV | 6101 | GTCACCGAACTCACACAAGTC | 6102 | 162 |
| 761 | NGNMATF | 6103 | AATGGGAATATGGCGACTTTT | 6104 | 336 |
| 762 | EGGDSGG | 6105 | GAAGGCGGAGACAGCGGTGGA | 6106 | 49 |
| 763 | MGDIVTL | 6107 | ATGGGGGATATTGTTACGCTT | 6108 | 95 |
| 764 | LIVTENQ | 6109 | TTGATTGTGACGGAGAATCAG | 6110 | 237 |
| 765 | SVATGVL | 6111 | AGCGTGGCTACAGGCGTGCTC | 6112 | 44 |
| 766 | VSPSVLQ | 6113 | GTTAGTCCTTCGGTGCTTCAG | 6114 | 161 |
| 767 | VTGLTVQ | 6115 | GTTACCGGGCTGACAGTACAA | 6116 | 160 |
| 768 | ASQDRGS | 6117 | GCATCTCAAGACCGGGGCTCT | 6118 | 327 |
| 769 | SSVSSPR | 6119 | TCCAGCGTCTCCTCTCCTCGC | 6120 | 43 |
| 770 | PILGAST | 6121 | CCGATTCTTGGTGCTAGTACG | 6122 | 328 |
| 771 | SQLSVML | 6123 | AGCCAACTTTCAGTAATGCTT | 6124 | 42 |
| 772 | TDALTSK | 6125 | ACAGACGCACTCACCAGTAAA | 6126 | 157 |
| 773 | YLEGTLL | 6127 | TACCTGGAAGGGACATTGCTC | 6128 | 113 |
| 774 | YQRTESL | 6129 | TATCAGAGGACGGAGTCTCTG | 6130 | 320 |
| 775 | QGGGSLN | 6131 | CAGGGGGGGGGTAGTCTGAAT | 6132 | 49 |
| 776 | PGSEIRG | 6133 | CCTGGCTCCGAAATAAGAGGC | 6134 | 33 |
| 777 | PSRGITL | 6135 | CCGAGTCGTGGTATTACTCTT | 6136 | 341 |
| 778 | GVAGTDS | 6137 | GGGGTGGCTGGGACGGATTCT | 6138 | 156 |
| 779 | MNGGHVM | 6139 | ATGAACGGTGGACACGTGATG | 6140 | 268 |
| 780 | TVPNTDL | 6141 | ACTGTGCCTAATACTGATTTG | 6142 | 60 |
| 781 | GHQALNA | 6143 | GGCCACCAAGCATTAAACGCC | 6144 | 235 |
| 782 | DPKTGWR | 6145 | GATCCGAAGACTGGGTGGCGT | 6146 | 316 |
| 783 | VTQAVYV | 6147 | GTTACGCAGGCTGTTTATGTT | 6148 | 300 |
| 784 | FETGGVS | 6149 | TTCGAAACCGGAGGCGTTTCC | 6150 | 240 |
| 785 | IADMGGN | 6151 | ATTGCTGATATGGGTGGTAAT | 6152 | 62 |
| 786 | PGYSSQT | 6153 | CCGGGGTATAGTTCTCAGACG | 6154 | 158 |
| 787 | LLLGVQS | 6155 | CTCCTATTAGGAGTACAATCG | 6156 | 155 |
| 788 | AVDSSVR | 6157 | GCTGTTGACTCCAGCGTTAGA | 6158 | 40 |
| 789 | YESTRGQ | 6159 | TATGAGTCGACGAGGGGTCAG | 6160 | 151 |
| 790 | LNSPLHV | 6161 | CTGAATAGTCCGCTGCATGTT | 6162 | 112 |
| 791 | ADTAHPV | 6163 | GCCGACACCGCCCACCCCGTT | 6164 | 245 |
| 792 | LPKGGGF | 6165 | CTGCCGAAGGGGGGGGGGTTT | 6166 | 30 |
| 793 | EGVSALL | 6167 | GAGGGTGTTTCTGCGTTGTTG | 6168 | 154 |
| 794 | PNERLTL | 6169 | CCAAACGAACGTTTGACCTTA | 6170 | 144 |
| 795 | SGGLMTG | 6171 | AGTGGTGGTCTTATGACTGGT | 6172 | 179 |
| 796 | VIETRLS | 6173 | GTCATCGAAACTCGCCTTTCC | 6174 | 152 |
| 797 | LANMLQV | 6175 | TTGGCAAACATGCTTCAAGTG | 6176 | 167 |
| 798 | SPTSSPH | 6177 | TCACCTACATCCTCACCACAC | 6178 | 52 |
| 799 | GVGGTYS | 6179 | GGAGTTGGGGGCACATACAGT | 6180 | 234 |
| 800 | AAESSVR | 6181 | GCGGCGGAGAGTTCTGTGCGG | 6182 | 38 |
| 801 | MNDAGRD | 6183 | ATGAATGATGCTGGGCGTGAT | 6184 | 286 |
| 802 | GISGEVS | 6185 | GGTATTTCGGGGGAGGTGAGT | 6186 | 149 |
| 803 | PQLIVPK | 6187 | CCTCAGCTTATTGTTCCTAAG | 6188 | 244 |
| 804 | LRVTENQ | 6189 | TTGCGTGTGACGGAGAATCAG | 6190 | 237 |
| 805 | TSPGLMV | 6191 | ACATCACCCGGCCTGATGGTT | 6192 | 323 |
| 806 | TTAAIDR | 6193 | ACCACTGCAGCCATCGACCGA | 6194 | 148 |
| 807 | HGNGYLS | 6195 | CACGGAAACGGGTACCTTTCA | 6196 | 110 |
| 808 | VVSDYTV | 6197 | GTTGTTAGTGATTATACTGTG | 6198 | 330 |
| 809 | RLAITER | 6199 | AGATTGGCGATTACTGAGCGG | 6200 | 147 |
| 810 | PGVDTGV | 6201 | CCTGGTGTTGATACTGGTGTT | 6202 | 99 |
| 811 | DTSASST | 6203 | GATACGTCGGCGTCGTCGACT | 6204 | 37 |
| 812 | ANEHNIA | 6205 | GCTAATGAGCATAATATTGCG | 6206 | 338 |
| 813 | IAHGYST | 6207 | ATCGCCCACGGATACAGCACA | 6208 | 222 |
| 814 | SLAISER | 6209 | AGCTTAGCCATCAGCGAAAGG | 6210 | 36 |
| 815 | RDLTTDL | 6211 | CGTGATCTGACGACTGATCTG | 6212 | 159 |
| 816 | EASSRLL | 6213 | GAAGCTTCGTCGCGACTTCTC | 6214 | 35 |
| 817 | AVKEYQS | 6215 | GCTGTTAAAGAATACCAATCT | 6216 | 277 |
| 818 | GIAVGEV | 6217 | GGTATTGCTGTGGGGGAGGTT | 6218 | 44 |
| 819 | RSITIGP | 6219 | CGTTCGATTACTATTGGGCCG | 6220 | 133 |
| 820 | LGDGTTR | 6221 | CTGGGGGATGGTACGACTCGG | 6222 | 255 |
| 821 | ALMSSGV | 6223 | GCGTTGATGTCCTCGGGGGTT | 6224 | 34 |
| 822 | TYSDGTT | 6225 | ACTTATAGTGATGGGACGACT | 6226 | 90 |
| 823 | ASGEVQS | 6227 | GCGTCGGGGGAGGTTCAGTCT | 6228 | 33 |
| 824 | FAGVQQA | 6229 | TTCGCAGGAGTCCAACAAGCT | 6230 | 287 |
| 825 | ESSRLQI | 6231 | GAGAGTTCGCGTCTTCAGATT | 6232 | 239 |
| 826 | DSGKDRT | 6233 | GATTCTGGTAAGGATCGTACG | 6234 | 37 |
| 827 | MLALAVT | 6235 | ATGTTGGCGCTGGCTGTGACG | 6236 | 32 |
| 828 | GERMGMT | 6237 | GGTGAGCGGATGGGTATGACT | 6238 | 270 |
| 829 | MADGASM | 6239 | ATGGCGGATGGTGCGTCTATG | 6240 | 255 |
| 830 | RHLTSDV | 6241 | CGACACCTCACATCCGACGTC | 6242 | 159 |
| 831 | EVLSLAP | 6243 | GAGGTGCTGTCTCTTGCTCCG | 6244 | 109 |
| 832 | DIAVSMR | 6245 | GACATCGCGGTATCGATGAGA | 6246 | 143 |
| 833 | RSAGTST | 6247 | AGGTCTGCAGGAACCTCCACA | 6248 | 29 |
| 834 | TSYDTVV | 6249 | ACATCATACGACACCGTCGTG | 6250 | 339 |
| 835 | VGASTAW | 6251 | GTGGGCGCCAGCACCGCGTGG | 6252 | 88 |
| 836 | RVELTGT | 6253 | CGCGTAGAATTGACCGGCACG | 6254 | 295 |
| 837 | VQGPLTG | 6255 | GTGCAGGGTCCGCTGACTGGT | 6256 | 14 |
| 838 | DRVISSL | 6257 | GATCGGGTTATTAGTTCTTTG | 6258 | 37 |
| 839 | PLILSPS | 6259 | CCCTTGATCTTATCTCCAAGT | 6260 | 117 |
| 840 | VRQLDSR | 6261 | GTGAGGCAGCTGGATTCGCGG | 6262 | 27 |
| 841 | LLAGADR | 6263 | TTGCTTGCTGGTGCTGATCGT | 6264 | 140 |
| 842 | YSTERSV | 6265 | TATTCGACTGAGAGGTCTGTT | 6266 | 320 |
| 843 | GPMASVV | 6267 | GGGCCGATGGCGTCTGTGGTT | 6268 | 216 |
| 844 | MLGGGAS | 6269 | ATGCTCGGCGGAGGTGCCTCC | 6270 | 298 |
| 845 | LRGQPGV | 6271 | CTGCGCGGCCAACCCGGCGTG | 6272 | 164 |
| 846 | GNGTRVL | 6273 | GGAAACGGCACCAGGGTCCTA | 6274 | 172 |
| 847 | GLVQIVA | 6275 | GGGCTTGTTCAGATTGTTGCG | 6276 | 326 |
| 848 | SFRDTVP | 6277 | AGTTTTAGGGATACGGTGCCT | 6278 | 318 |
| 849 | SLNSVKV | 6279 | TCCCTAAACTCGGTCAAAGTG | 6280 | 28 |
| 850 | HLSRDHS | 6281 | CACCTGTCACGTGACCACTCA | 6282 | 127 |
| 851 | SGDRDQN | 6283 | TCTGGTGATCGGGATCAGAAT | 6284 | 251 |
| 852 | SGPMKAV | 6285 | AGTGGGCCGATGAAGGCGGTT | 6286 | 304 |
| 853 | AGGGTPR | 6287 | GCGGGGGGTGGGACTCCGAGG | 6288 | 49 |
| 854 | NLRGEHT | 6289 | AATTTGCGTGGGGAGCATACG | 6290 | 131 |
| 855 | GGTGEGP | 6291 | GGTGGGACGGGTGAGGGTCCG | 6292 | 149 |
| 856 | LRVPENQ | 6293 | TTGCGTGTGCCGGAGAATCAG | 6294 | 237 |
| 857 | AAGLILN | 6295 | GCCGCAGGCCTCATCCTTAAC | 6296 | 179 |
| 858 | TGERDQN | 6297 | ACTGGTGAACGGGATCAGAAT | 6298 | 251 |
| 859 | TIAAHVP | 6299 | ACCATAGCAGCCCACGTACCC | 6300 | 91 |
| 860 | SFAITER | 6301 | AGTTTTGCGATTACTGAGCGG | 6302 | 322 |
| 861 | FTIKDNR | 6303 | TTCACCATAAAAGACAACAGA | 6304 | 237 |
| 862 | ESRENVR | 6305 | GAATCCCGTGAAAACGTCAGA | 6306 | 316 |
| 863 | LPRLGGL | 6307 | CTTCCGCGTTTGGGGGGGCTT | 6308 | 30 |
| 864 | GPDTGAK | 6309 | GGTCCAGACACAGGAGCCAAA | 6310 | 10 |
| 865 | TGGLLYS | 6311 | ACTGGTGGGCTTCTTTATAGT | 6312 | 179 |
| 866 | RSGSGVA | 6313 | CGGTCGGGCTCCGGAGTCGCC | 6314 | 163 |
| 867 | LTGSIGL | 6315 | TTAACTGGGTCAATTGGACTC | 6316 | 164 |
| 868 | TLPHAGL | 6317 | ACCCTCCCCCACGCAGGGTTA | 6318 | 34 |
| 869 | VDHGMGL | 6319 | GTTGATCATGGTATGGGTTTG | 6320 | 212 |
| 870 | TVELNHV | 6321 | ACGGTTGAGCTGAATCATGTT | 6322 | 162 |
| 871 | VLSSDLR | 6323 | GTGCTTTCGAGTGATCTTCGT | 6324 | 118 |
| 872 | TLTYTET | 6325 | ACATTGACATACACTGAAACC | 6326 | 79 |
| 873 | FIDSQLG | 6327 | TTTATTGATAGTCAGCTGGGT | 6328 | 152 |
| 874 | FSTNSNH | 6329 | TTCTCGACCAACAGCAACCAC | 6330 | 138 |
| 875 | MGASDTL | 6331 | ATGGGGGCTAGTGATACGCTT | 6332 | 26 |
| 876 | TTGKVSG | 6333 | ACCACGGGTAAAGTGTCGGGG | 6334 | 236 |
| 877 | MDELRGR | 6335 | ATGGACGAATTACGCGGCAGA | 6336 | 157 |
| 878 | SVDNGLL | 6337 | TCCGTCGACAACGGCTTACTG | 6338 | 210 |
| 879 | TGMQVSI | 6339 | ACCGGTATGCAAGTGTCGATC | 6340 | 190 |
| 880 | SVVSGLL | 6341 | TCTGTGGTGTCAGGTCTTTTG | 6342 | 25 |
| 881 | EQYLGSP | 6343 | GAGCAGTATCTGGGTTCTCCG | 6344 | 74 |
| 882 | LSHTEGD | 6345 | TTATCACACACCGAAGGGGAC | 6346 | 259 |
| 883 | DFSVAHT | 6347 | GACTTCTCTGTAGCGCACACT | 6348 | 37 |
| 884 | MATPTNT | 6349 | ATGGCAACGCCAACTAACACC | 6350 | 77 |
| 885 | NTEDRRV | 6351 | AACACAGAAGACCGGCGAGTT | 6352 | 242 |
| 886 | AGVLKAL | 6353 | GCAGGAGTATTAAAAGCCCTC | 6354 | 304 |
| 887 | NAHALMV | 6355 | AACGCCCACGCACTCATGGTC | 6356 | 89 |
| 888 | VHVDNSN | 6357 | GTGCATGTTGATAATAGTAAT | 6358 | 45 |
| 889 | LSIRQGP | 6359 | TTGAGTATTCGTCAGGGTCCT | 6360 | 259 |
| 890 | GVNHAVA | 6361 | GGAGTCAACCACGCCGTCGCC | 6362 | 4 |
| 891 | AYVTQGG | 6363 | GCCTACGTAACACAAGGCGGC | 6364 | 345 |
| 892 | WDDQTSG | 6365 | TGGGATGATCAGACTTCGGGG | 6366 | 204 |
| 893 | LDLTSDV | 6367 | CTTGATCTGACGTCTGATGTG | 6368 | 159 |
| 894 | IPSDFPN | 6369 | ATACCATCCGACTTCCCGAAC | 6370 | 271 |
| 895 | SLVRGLL | 6371 | AGTCTTGTTCGGGGTTTGCTG | 6372 | 25 |
| 896 | IVYAVGE | 6373 | ATAGTCTACGCTGTTGGAGAA | 6374 | 133 |
| 897 | LAGLGGM | 6375 | CTAGCTGGCCTCGGTGGAATG | 6376 | 164 |
| 898 | SDEAYRA | 6377 | AGCGATGAGGCTTATCGTGCG | 6378 | 245 |
| 899 | VGQVPGR | 6379 | GTGGGGCAAGTCCCGGGTAGG | 6380 | 168 |
| 900 | SVDSALL | 6381 | TCCGTGGACTCTGCTTTGCTG | 6382 | 24 |
| 901 | LSLRDGV | 6383 | CTATCCCTTAGGGACGGAGTC | 6384 | 259 |
| 902 | STIPTPM | 6385 | TCCACAATCCCAACCCCCATG | 6386 | 308 |
| 903 | IPRIHSL | 6387 | ATTCCTCGGATTCATTCTCTT | 6388 | 245 |
| 904 | LSGIMVS | 6389 | TTGTCGGGGATTATGGTTTCG | 6390 | 305 |
| 905 | GFVQSRM | 6391 | GGGTTTGTTCAGAGTCGGATG | 6392 | 326 |
| 906 | SSQGTTK | 6393 | TCTTCGCAGGGTACGACTAAG | 6394 | 23 |
| 907 | NHVGDRL | 6395 | AATCATGTTGGTGATCGTTTG | 6396 | 226 |
| 908 | VESTAFT | 6397 | GTTGAGAGTACGGCTTTTACG | 6398 | 214 |
| 909 | LVAGQAM | 6399 | CTGGTGGCGGGGCAGGCTATG | 6400 | 21 |
| 910 | GLVRIQD | 6401 | GGACTGGTTCGGATCCAAGAC | 6402 | 326 |
| 911 | TNTDSSL | 6403 | ACGAATACGGATTCTAGTCTG | 6404 | 20 |
| 912 | TGLQVST | 6405 | ACTGGGCTGCAGGTTAGTACT | 6406 | 227 |
| 913 | AHGDKDL | 6407 | GCACACGGCGACAAAGACCTT | 6408 | 291 |
| 914 | SSANLSN | 6409 | TCGTCCGCCAACCTTTCGAAC | 6410 | 19 |
| 915 | EIAFTVP | 6411 | GAAATAGCATTCACCGTACCT | 6412 | 120 |
| 916 | SGEPLGL | 6413 | TCTGGGGAGCCGCTTGGGCTT | 6414 | 279 |
| 917 | QNVGVTK | 6415 | CAAAACGTAGGAGTTACGAAA | 6416 | 64 |
| 918 | LSNLSNG | 6417 | CTTAGTAATCTGTCGAATGGT | 6418 | 247 |
| 919 | LSTGEEM | 6419 | CTTTCGACGGGTGAGGAGATG | 6420 | 232 |
| 920 | EGGGAQR | 6421 | GAGGGGGGTGGGGCTCAGAGG | 6422 | 49 |
| 921 | DVRGSVN | 6423 | GACGTCCGGGGGTCTGTCAAC | 6424 | 149 |
| 922 | LNGDTGY | 6425 | CTTAATGGTGATACGGGGTAT | 6426 | 164 |
| 923 | MGDNYDR | 6427 | ATGGGCGACAACTACGACCGC | 6428 | 228 |
| 924 | QLRPLQT | 6429 | CAACTGCGTCCTTTGCAAACG | 6430 | 318 |
| 925 | AGVMNDL | 6431 | GCCGGTGTTATGAACGACCTT | 6432 | 304 |
| 926 | LLENARV | 6433 | CTGCTGGAGAATGCGAGGGTG | 6434 | 243 |
| 927 | LVVDASR | 6435 | TTGGTAGTAGACGCAAGTCGC | 6436 | 18 |
| 928 | LATHDAR | 6437 | CTCGCAACGCACGACGCACGA | 6438 | 193 |
| 929 | VRQLDSN | 6439 | GTAAGACAACTTGACTCTAAC | 6440 | 66 |
| 930 | QARDTKT | 6441 | CAAGCTCGAGACACCAAAACA | 6442 | 246 |
| 931 | TGDREQN | 6443 | ACTGGTGATCGGGAACAGAAT | 6444 | 251 |
| 932 | SGAAAAT | 6445 | AGCGGGGCCGCAGCCGCCACC | 6446 | 17 |
| 933 | GRKGEGP | 6447 | GGTAGGAAGGGTGAGGGTCCG | 6448 | 149 |
| 934 | QNVGVTQ | 6449 | CAGAATGTGGGGGTGACTCAG | 6450 | 64 |
| 935 | DSAPAAR | 6451 | GATTCGGCTCCGGCGGCTCGG | 6452 | 16 |
| 936 | ANQNVII | 6453 | GCAAACCAAAACGTAATAATA | 6454 | 265 |
| 937 | GAHIVSA | 6455 | GGGGCGCACATAGTCTCCGCA | 6456 | 106 |
| 938 | NSDLASP | 6457 | AATAGTGATTTGGCGTCTCCT | 6458 | 242 |
| 939 | AASMVVG | 6459 | GCTGCGAGTATGGTTGTTGGG | 6460 | 269 |
| 940 | VVSEIPL | 6461 | GTCGTTAGCGAAATCCCCCTC | 6462 | 271 |
| 941 | QAESAAR | 6463 | CAAGCGGAATCAGCGGCTAGA | 6464 | 16 |
| 942 | LSKEHAH | 6465 | TTATCGAAAGAACACGCCCAC | 6466 | 57 |
| 943 | TNLADTA | 6467 | ACTAATCTGGCTGATACTGCG | 6468 | 273 |
| 944 | ADREVRY | 6469 | GCGGATCGGGAGGTGCGTTAT | 6470 | 15 |
| 945 | NISVTPV | 6471 | AATATTAGTGTTACGCCGGTT | 6472 | 276 |
| 946 | PSRGNEG | 6473 | CCCAGTCGCGGGAACGAAGGC | 6474 | 294 |
| 947 | MMLNQGS | 6475 | ATGATGCTTAACCAAGGCAGC | 6476 | 259 |
| 948 | VHSQDVS | 6477 | GTGCATTCGCAGGATGTGTCT | 6478 | 346 |
| 949 | ANAEVQR | 6479 | GCGAATGCGGAGGTTCAGCGT | 6480 | 15 |
| 950 | LGPGITL | 6481 | TTAGGCCCCGGTATCACCCTC | 6482 | 95 |
| 951 | NVAELVA | 6483 | AACGTCGCAGAATTGGTGGCA | 6484 | 288 |
| 952 | ILSGLTS | 6485 | ATTCTGAGTGGGTTGACTTCT | 6486 | 14 |
| 953 | VNVSPTT | 6487 | GTGAATGTTAGTCCTACTACT | 6488 | 13 |
| 954 | GERDARI | 6489 | GGTGAGAGGGATGCTAGGATT | 6490 | 315 |
| 955 | IGMSAST | 6491 | ATAGGTATGAGCGCGTCCACC | 6492 | 13 |
| 956 | LSRGEEK | 6493 | CTTTCGAGGGGTGAGGAGAAG | 6494 | 294 |
| 957 | KNKGVDP | 6495 | AAAAACAAAGGCGTCGACCCA | 6496 | 337 |
| 958 | HQDRTTL | 6497 | CATCAGGATAGGACGACGCTT | 6498 | 144 |
| 959 | RISTEGT | 6499 | CGCATCAGCACAGAAGGCACT | 6500 | 295 |
| 960 | ALSGLAK | 6501 | GCACTGTCCGGACTCGCAAAA | 6502 | 12 |
| 961 | IGASVKL | 6503 | ATCGGTGCATCGGTAAAACTG | 6504 | 11 |
| 962 | ISLNAAE | 6505 | ATTTCGCTGAATGCGGCGGAG | 6506 | 9 |
| 963 | SHGSDTK | 6507 | TCCCACGGAAGTGACACCAAA | 6508 | 174 |
| 964 | HGRDALV | 6509 | CATGGGCGGGATGCTCTTGTG | 6510 | 154 |
| 965 | GVAGTYL | 6511 | GGGGTGGCTGGGACGTATCTG | 6512 | 234 |
| 966 | STEGAAL | 6513 | AGTACGGAGGGGGCGGCTCTG | 6514 | 8 |
| 967 | SVMGVVR | 6515 | TCCGTCATGGGAGTAGTTCGT | 6516 | 7 |
| 968 | SVVVTAR | 6517 | TCGGTCGTCGTAACAGCTCGG | 6518 | 6 |
| 969 | PLVGAPV | 6519 | CCGCTGGTTGGGGCTCCGGTT | 6520 | 328 |
| 970 | MGGATNP | 6521 | ATGGGGGGGGCTACTAATCCG | 6522 | 195 |
| 971 | NGPMEAV | 6523 | AACGGACCAATGGAAGCAGTC | 6524 | 333 |
| 972 | QVTDTKT | 6525 | CAGGTGACTGATACTAAGACT | 6526 | 246 |
| 973 | NSKDVQR | 6527 | AACTCCAAAGACGTACAAAGA | 6528 | 15 |
| 974 | RTTEPRF | 6529 | CGTACTACGGAGCCTCGTTTT | 6530 | 248 |
| 975 | VVGLTAA | 6531 | GTTGTCGGCTTAACCGCAGCG | 6532 | 5 |
| 976 | PGEHYQV | 6533 | CCTGGCGAACACTACCAAGTG | 6534 | 196 |
| 977 | RAVENMG | 6535 | CGCGCAGTAGAAAACATGGGC | 6536 | 349 |
| 978 | RVMGEEV | 6537 | CGTGTGATGGGGGAGGAGGTT | 6538 | 312 |
| 979 | KYSGAES | 6539 | AAATACTCTGGCGCGGAATCT | 6540 | 348 |
| 980 | MLVTETV | 6541 | ATGTTGGTCACTGAAACGGTA | 6542 | 259 |
| 981 | VFVEKSA | 6543 | GTTTTTGTTGAGAAGAGTGCG | 6544 | 344 |
| 982 | SVNQAVT | 6545 | TCTGTGAATCAGGCGGTTACG | 6546 | 4 |
| 983 | GHSATAA | 6547 | GGACACTCCGCTACCGCCGCA | 6548 | 235 |
| 984 | HDTSASV | 6549 | CATGATACTAGTGCTAGTGTT | 6550 | 223 |
| 985 | SVDSGLI | 6551 | TCCGTAGACTCCGGACTTATC | 6552 | 220 |
| 986 | VGKVMDV | 6553 | GTCGGAAAAGTCATGGACGTC | 6554 | 206 |
| 987 | AIVSIAK | 6555 | GCCATCGTTTCAATAGCAAAA | 6556 | 3 |
| 988 | PAEHYQA | 6557 | CCGGCTGAGCATTATCAGGCT | 6558 | 196 |
| 989 | VSLTDGL | 6559 | GTGAGTTTGACTGATGGGCTT | 6560 | 259 |
| 990 | SVTDVNH | 6561 | TCTGTTACTGATGTTAATCAT | 6562 | 261 |
| 991 | GLNEHEA | 6563 | GGTCTGAATGAGCATGAGGCG | 6564 | 331 |
| 992 | ANVGRDD | 6565 | GCAAACGTTGGCCGCGACGAC | 6566 | 218 |
| 993 | AGYSSLT | 6567 | GCTGGATACTCGTCACTCACA | 6568 | 158 |
| 994 | QLQPQQT | 6569 | CAACTCCAACCCCAACAAACC | 6570 | 50 |
| 995 | MRVTENQ | 6571 | ATGAGGGTCACTGAAAACCAA | 6572 | 237 |
| 996 | ITEQTTI | 6573 | ATTACTGAGCAGACTACTATT | 6574 | 2 |
| 997 | VVDSDNL | 6575 | GTTGTTGATTCGGATAATCTG | 6576 | 141 |
| 998 | FSTDTSS | 6577 | TTTTCGACGGATACGTCGTCT | 6578 | 138 |

Macaque all CNS_sequence Rank

| | | SEQ | | |
|---|---|---|---|---|
| | | ID | | |
| Rank | Peptide | NO: | Sequence | SEQ ID NO: |
| 1 | PSQGTLR | 6579 | CCTTCTCAGGGGACGCTTCGG | 6580 |
| 2 | PTQGTVR | 6581 | CCCACACAAGGCACAGTCCGT | 6582 |
| 3 | TDALTTK | 6583 | ACTGATGCGCTTACGACTAAG | 6584 |
| 4 | TDAGDGK | 6585 | ACAGACGCGGGGGACGGCAAA | 6586 |
| 5 | MTGISIV | 6587 | ATGACAGGCATCTCTATCGTA | 6588 |
| 6 | NGYTEGR | 6589 | AATGGGTATACGGAGGGGCGT | 6590 |
| 7 | PTQGTVR | 6591 | CCTACTCAGGGGACGGTTCGG | 6592 |
| 8 | SLVTSST | 6593 | TCGCTTGTTACTTCTAGTACG | 6594 |
| 9 | PTQGTFR | 6595 | CCGACACAAGGAACATTCAGG | 6596 |
| 10 | PTQGTIR | 6597 | CCTACTCAGGGGACGATTCGG | 6598 |
| 11 | AIVSIAQ | 6599 | GCGATTGTGTCGATTGCTCAG | 6600 |
| 12 | LTSGLAA | 6601 | TTGACGTCTGGTTTGGCGGCG | 6602 |
| 13 | PTQGTFR | 6603 | CCTACTCAGGGGACGTTTCGG | 6604 |
| 14 | STIPTMK | 6605 | AGTACTATTCCTACTATGAAG | 6606 |
| 15 | GTVGSMV | 6607 | GGTACGGTGGGTTCTATGGTT | 6608 |
| 16 | ELMASTI | 6609 | GAGCTTATGGCTTCTACTATT | 6610 |
| 17 | SPVGIIA | 6611 | TCTCCTGTGGGTATTATTGCG | 6612 |
| 18 | TSREEQW | 6613 | ACTTCTCGTGAGGAGCAGTGG | 6614 |
| 19 | RASADVV | 6615 | AGGGCGAGTGCGGATGTTGTG | 6616 |
| 20 | RYNDEST | 6617 | AGATACAACGACGAATCCACT | 6618 |
| 21 | HTIAASM | 6619 | CACACCATAGCCGCAAGTATG | 6620 |
| 22 | HTQGTLR | 6621 | CATACTCAGGGGACGCTTCGG | 6622 |
| 23 | DGRAELR | 6623 | GATGGGCGGGCGGAGTTGCGT | 6624 |
| 24 | AADSSAR | 6625 | GCCGCTGACTCATCGGCCCGT | 6626 |
| 25 | NLGAALS | 6627 | AACCTTGGGGCTGCCCTATCG | 6628 |
| 26 | ALNEHVA | 6629 | GCTCTGAATGAGCATGTGGCG | 6630 |
| 27 | IMVDAHS | 6631 | ATTATGGTTGATGCTCATTCG | 6632 |
| 28 | PAQGTLR | 6633 | CCGGCGCAAGGAACACTACGA | 6634 |
| 29 | SIGDLGK | 6635 | AGTATCGGTGACCTAGGTAAA | 6636 |
| 30 | PSQGTLR | 6637 | CCGTCCCAAGGAACACTCAGG | 6638 |
| 31 | PTHGTLR | 6639 | CCGACCCACGGTACACTGCGA | 6640 |
| 32 | NRELALG | 6641 | AACCGCGAACTCGCACTCGGG | 6642 |
| 33 | AGGGDPR | 6643 | GCTGGTGGAGGTGACCCCCGA | 6644 |
| 34 | PNERPTV | 6645 | CCCAACGAACGTCCAACGGTC | 6646 |
| 35 | AGVSASL | 6647 | GCGGGTGTTTCTGCGTCGTTG | 6648 |
| 36 | VIAGVGI | 6649 | GTAATCGCGGGAGTAGGCATC | 6650 |
| 37 | AIQTNDA | 6651 | GCAATCCAAACCAACGACGCG | 6652 |
| 38 | RTMGDST | 6653 | CGGACAATGGGTGACAGTACG | 6654 |
| 39 | KNQDMQV | 6655 | AAGAATCAGGATATGCAGGTG | 6656 |
| 40 | NGNMATF | 6657 | AATGGGAATATGGCGACTTTT | 6658 |
| 41 | MVTHTNK | 6659 | ATGGTAACACACACAAACAAA | 6660 |
| 42 | SLLLTTP | 6661 | TCATTACTATTGACGACACCC | 6662 |
| 43 | SSVQGIL | 6663 | TCCTCAGTCCAAGGAATACTA | 6664 |
| 44 | RIVDSVP | 6665 | AGGATTGTGGATAGTGTTCCG | 6666 |
| 45 | PTEGTLR | 6667 | CCGACAGAAGGCACACTGCGA | 6668 |
| 46 | YLVTTEN | 6669 | TATTTGGTTACTACTGAGAAT | 6670 |
| 47 | PTQGTLR | 6671 | CCTACTCAGGGGACGCTTCGG | 6672 |
| 48 | LLAGADR | 6673 | TTGCTTGCTGGTGCTGATCGT | 6674 |
| 49 | HSKGFDY | 6675 | CACAGTAAAGGTTTCGACTAC | 6676 |
| 50 | FQVEQVK | 6677 | TTTCAGGTTGAGCAGGTTAAG | 6678 |
| 51 | TGGRDQY | 6679 | ACTGGTGGTCGGGATCAGTAT | 6680 |
| 52 | PTPGTLR | 6681 | CCTACTCCGGGGACGCTTCGG | 6682 |
| 53 | LGDSAEA | 6683 | CTTGGGGATTCTGCTGAGGCG | 6684 |
| 54 | RVDSEQH | 6685 | AGGGTGGATTCGGAGCAGCAT | 6686 |
| 55 | SVDSGML | 6687 | AGTGTTGATAGTGGGATGCTT | 6688 |
| 56 | NTENASR | 6689 | AATACTGAGAATGCGTCGCGG | 6690 |
| 57 | PTLGTLR | 6691 | CCTACTCTGGGGACGCTTCGG | 6692 |
| 58 | RVALDLP | 6693 | AGGGTGGCGCTGGATTTGCCG | 6694 |
| 59 | AGDRDQY | 6695 | GCTGGTGATCGGGATCAGTAT | 6696 |
| 60 | VIALTEA | 6697 | GTGATTGCGTTGACGGAGGCT | 6698 |
| 61 | STIHTLK | 6699 | AGTACTATTCATACTCTGAAG | 6700 |
| 62 | REALALT | 6701 | AGGGAGGCGCTGGCTCTGACG | 6702 |
| 63 | TTSGNLM | 6703 | ACGACGTCGGGGAATCTTATG | 6704 |
| 64 | LTLSNGV | 6705 | CTTACGCTGAGTAATGGGGTG | 6706 |
| 65 | GVVNDER | 6707 | GGCGTTGTCAACGACGAACGG | 6708 |
| 66 | DKVVDEV | 6709 | GATAAGGTGGTTGATGAGGTG | 6710 |
| 67 | MAASVTL | 6711 | ATGGCGGCTAGTGTTACGCTT | 6712 |
| 68 | LTGERIL | 6713 | CTAACCGGTGAACGCATACTT | 6714 |
| 69 | NTVVNDP | 6715 | AACACAGTCGTGAACGACCCT | 6716 |
| 70 | VNAALGI | 6717 | GTTAATGCTGCGCTTGGGATT | 6718 |
| 71 | SRELTGS | 6719 | TCGAGGGAGTTGACTGGGTCG | 6720 |
| 72 | TVDSPMR | 6721 | ACCGTCGACAGCCCTATGCGA | 6722 |
| 73 | ATDSSVR | 6723 | GCCACCGACAGCAGTGTCCGT | 6724 |
| 74 | LESLSHH | 6725 | CTGGAGTCGCTTTCTCATCAT | 6726 |
| 75 | ALGTQGS | 6727 | GCTCTGGGTACGCAGGGTTCT | 6728 |
| 76 | RTTPDVP | 6729 | CGTACGACTCCCGACGTACCT | 6730 |
| 77 | VLNDNLA | 6731 | GTGTTAAACGACAACTTAGCT | 6732 |
| 78 | CNAAGCP | 6733 | TGTAATGCTGCGGGGTGTCCG | 6734 |
| 79 | LHAGESR | 6735 | CTTCATGCTGGTGAGTCTAGG | 6736 |
| 80 | HAGLGVT | 6737 | CATGCTGGTCTTGGTGTTACT | 6738 |
| 81 | KIGENAS | 6739 | AAGATTGGTGAGAATGCTTCT | 6740 |
| 82 | NAHDTET | 6741 | AATGCGCATGATACTGAGACT | 6742 |
| 83 | TGLQDSN | 6743 | ACAGGATTGCAAGACTCGAAC | 6744 |
| 84 | ASNPGRW | 6745 | GCGAGTAACCCTGGAAGGTGG | 6746 |
| 85 | VVGTQDR | 6747 | GTTGTGGGGACTCAGGATAGG | 6748 |
| 86 | VHASSPT | 6749 | GTGCATGCTTCTAGTCCGACT | 6750 |
| 87 | NGLQVSI | 6751 | AATGGGCTGCAGGTTAGTATT | 6752 |
| 88 | TVPNTDL | 6753 | ACTGTGCCTAATACTGATTTG | 6754 |
| 89 | FLLGHTD | 6755 | TTCCTTCTGGGGCACACGGAC | 6756 |
| 90 | REISILS | 6757 | CGCGAAATATCGATACTATCT | 6758 |
| 91 | DSLLPQT | 6759 | GATTCTCTGCTTCCTCAGACT | 6760 |
| 92 | RGGVTTE | 6761 | CGTGGAGGCGTAACCACCGAA | 6762 |
| 93 | HVASAGA | 6763 | CATGTTGCTTCGGCGGGGGCG | 6764 |
| 94 | FGGVINA | 6765 | TTCGGGGGAGTAATAAACGCT | 6766 |
| 95 | NGMGDVT | 6767 | AACGGCATGGGGGACGTTACT | 6768 |
| 96 | TTVEVSG | 6769 | ACAACCGTAGAAGTAAGCGGC | 6770 |
| 97 | VGGNVVH | 6771 | GTTGGTGGTAATGTTGTTCAT | 6772 |
| 98 | PMRPGVA | 6773 | CCGATGCGGCCGGGTGTGGCT | 6774 |
| 99 | RESGEQA | 6775 | AGGGAGAGTGGGGAGCAGGCT | 6776 |
| 100 | LSLTEGV | 6777 | CTGAGTTTGACTGAGGGGGTT | 6778 |
| 101 | PKPSHGE | 6779 | CCTAAACCATCTCACGGAGAA | 6780 |
| 102 | YQRTESL | 6781 | TATCAGAGGACGGAGTCTCTG | 6782 |
| 103 | PGEHYRL | 6783 | CCTGGAGAACACTACAGATTG | 6784 |
| 104 | TSVESNL | 6785 | ACGTCGGTGGAGTCGAATCTT | 6786 |
| 105 | GSGAGLH | 6787 | GGAAGTGGAGCTGGCCTTCAC | 6788 |
| 106 | MAGGTNP | 6789 | ATGGCAGGTGGCACAAACCCT | 6790 |
| 107 | RESLEAL | 6791 | AGGGAGAGTCTTGAGGCGTTG | 6792 |
| 108 | KGYDTPM | 6793 | AAAGGCTACGACACACCCATG | 6794 |
| 109 | DQLNDGR | 6795 | GATCAGCTGAATGATGGGCGG | 6796 |
| 110 | TIGVVAN | 6797 | ACGATTGGGGTTGTGGCGAAT | 6798 |
| 111 | LSTGSQL | 6799 | CTGTCTACGGGGTCGCAGCTG | 6800 |
| 112 | VPGSTTT | 6801 | GTTCCAGGCTCAACGACTACC | 6802 |
| 113 | MGDAGLR | 6803 | ATGGGGGATGCGGGGCTGCGG | 6804 |
| 114 | SPTSSPH | 6805 | TCACCTACATCCTCACCACAC | 6806 |
| 115 | ESLAGVR | 6807 | GAATCGTTGGCAGGGGTGCGT | 6808 |
| 116 | KLAEGVR | 6809 | AAACTAGCCGAAGGAGTGCGG | 6810 |
| 117 | GNSGDHF | 6811 | GGTAACTCTGGTGACCACTTC | 6812 |
| 118 | AVITEPK | 6813 | GCGGTGATTACTGAGCCTAAG | 6814 |
| 119 | APTATLR | 6815 | GCGCCTACTGCTACTCTTCGG | 6816 |
| 120 | STFSTVM | 6817 | AGCACATTCTCCACTGTTATG | 6818 |
| 121 | VLASLGD | 6819 | GTACTCGCGTCGTTGGGCGAC | 6820 |
| 122 | AAGVIPN | 6821 | GCCGCCGGAGTGATACCTAAC | 6822 |
| 123 | PGEPLRL | 6823 | CCGGGAGAACCCTTGCGACTC | 6824 |
| 124 | VTSDAGW | 6825 | GTCACCTCTGACGCAGGGTGG | 6826 |
| 125 | STLISET | 6827 | TCCACGTTGATATCAGAAACC | 6828 |
| 126 | VGGAGEI | 6829 | GTTGGTGGGGCGGGTGAGATT | 6830 |
| 127 | KTAQVQP | 6831 | AAGACGGCGCAGGTGCAGCCG | 6832 |
| 128 | SMNGTSL | 6833 | AGTATGAATGGGACTAGTCTT | 6834 |
| 129 | MVGLMGA | 6835 | ATGGTGGGTCTGATGGGGGCT | 6836 |
| 130 | LNVVDLQ | 6837 | TTGAACGTTGTGGACTTGCAA | 6838 |
| 131 | SVVSGLL | 6839 | TCTGTGGTGTCAGGTCTTTTG | 6840 |
| 132 | MAGGVQV | 6841 | ATGGCGGGTGGGGTGCAGGTT | 6842 |
| 133 | SVTERSG | 6843 | TCTGTGACGGAGAGGAGTGGT | 6844 |
| 134 | PNQGTLR | 6845 | CCAAACCAAGGTACTCTACGA | 6846 |
| 135 | GLNEHEA | 6847 | GGTCTGAATGAGCATGAGGCG | 6848 |
| 136 | RVENGGT | 6849 | CGAGTGGAAAACGGCGGGACC | 6850 |
| 137 | VSLTDGL | 6851 | GTGAGTTTGACTGATGGGCTT | 6852 |
| 138 | SRLENIS | 6853 | TCGCGTCTTGAAAACATCTCC | 6854 |
| 139 | SVVPNVQ | 6855 | TCGGTGGTGCCGAATGTGCAG | 6856 |
| 140 | TSMGIMV | 6857 | ACGAGTATGGGTATTATGGTG | 6858 |
| 141 | TGLGDRA | 6859 | ACCGGCTTGGGAGACAGGGCT | 6860 |
| 142 | VGSVTDS | 6861 | GTTGGTAGCGTAACCGACTCC | 6862 |
| 143 | RTDGADH | 6863 | CGCACAGACGGAGCAGACCAC | 6864 |
| 144 | MSISEPR | 6865 | ATGTCTATTAGTGAGCCGCGG | 6866 |
| 145 | MGGVTNP | 6867 | ATGGGAGGTGTCACCAACCCC | 6868 |
| 146 | PSRGNEG | 6869 | CCCAGTCGCGGGAACGAAGGC | 6870 |
| 147 | SAGGSLQ | 6871 | AGTGCTGGTGGGAGTCTTCAG | 6872 |
| 148 | GPRNSID | 6873 | GGCCCACGTAACTCTATCGAC | 6874 |
| 149 | VLSGEEL | 6875 | GTTCTTAGTGGGGAGGAGTTG | 6876 |
| 150 | TRTEDYT | 6877 | ACGCGTACGGAGGATTATACT | 6878 |
| 151 | VTGHPTL | 6879 | GTTACGGGTCATCCGACTCTT | 6880 |
| 152 | LETVGSP | 6881 | CTGGAGACGGTTGGTTCTCCG | 6882 |
| 153 | VGRDFPA | 6883 | GTGGGTCGGGATTTTCCGGCT | 6884 |
| 154 | STQGGLA | 6885 | AGTACCCAAGGCGGATTAGCG | 6886 |
| 155 | TAVERAW | 6887 | ACGGCTGTTGAGCGGGCGTGG | 6888 |
| 156 | PLVGAPV | 6889 | CCGCTGGTTGGGGCTCCGGTT | 6890 |
| 157 | ITQAAYV | 6891 | ATCACACAAGCGGCGTACGTG | 6892 |
| 158 | LGGDVVA | 6893 | TTGGGTGGTGATGTGGTGGCG | 6894 |
| 159 | NGSSIGV | 6895 | AACGGCTCATCTATCGGCGTG | 6896 |
| 160 | TGSIPSP | 6897 | ACCGGTTCAATCCCTTCCCCC | 6898 |
| 161 | GLEKMTS | 6899 | GGTCTGGAGAAGATGACTTCT | 6900 |
| 162 | QADDHGR | 6901 | CAGGCGGATGATCATGGTAGG | 6902 |
| 163 | TMLAGSI | 6903 | ACCATGCTAGCAGGCAGCATC | 6904 |
| 164 | ASIPTLN | 6905 | GCATCCATACCAACGCTAAAC | 6906 |
| 165 | LHNLTQP | 6907 | CTTCATAATCTTACGCAGCCT | 6908 |
| 166 | LTAISDH | 6909 | CTTACGGCGATTAGTGATCAT | 6910 |
| 167 | VAALGMT | 6911 | GTTGCTGCTTTGGGTATGACT | 6912 |
| 168 | ALGDALR | 6913 | GCACTAGGCGACGCATTACGC | 6914 |
| 169 | GSGNGGS | 6915 | GGTAGTGGGAATGGTGGGAGT | 6916 |
| 170 | SADSSVR | 6917 | TCGGCGGATAGTTCTGTGCGG | 6918 |
| 171 | SVATGVL | 6919 | AGCGTGGCTACAGGCGTGCTC | 6920 |
| 172 | LVTGMSS | 6921 | CTTGTTACTGGGATGAGTTCT | 6922 |
| 173 | MVTSGLT | 6923 | ATGGTTACGTCGGGGTTGACG | 6924 |
| 174 | PREHNQA | 6925 | CCGCGTGAGCATAATCAGGCT | 6926 |
| 175 | TSPGLMV | 6927 | ACATCACCCGGCCTGATGGTT | 6928 |
| 176 | PQHIDPE | 6929 | CCTCAGCATATTGATCCTGAG | 6930 |
| 177 | GGVSATA | 6931 | GGAGGAGTCAGCGCAACGGCT | 6932 |
| 178 | SLVQGTV | 6933 | AGTCTTGTGCAGGGGACTGTT | 6934 |
| 179 | SGEPLGL | 6935 | TCTGGGGAGCCGCTTGGGCTT | 6936 |
| 180 | SQLSVML | 6937 | AGCCAACTTTCAGTAATGCTT | 6938 |
| 181 | TLTDVVH | 6939 | ACTCTTACTGATGTGGTGCAT | 6940 |
| 182 | QDGPAVK | 6941 | CAGGATGGGCCTGCGGTGAAG | 6942 |
| 183 | RGQSDPL | 6943 | CGGGGGCAGTCTGATCCGTTG | 6944 |
| 184 | IMVGTTT | 6945 | ATAATGGTAGGTACGACTACG | 6946 |
| 185 | LGSDESR | 6947 | CTGGGGTCGGATGAGAGTCGG | 6948 |
| 186 | NLGGVQL | 6949 | AACTTAGGAGGCGTCCAATTG | 6950 |
| 187 | SEQNKVW | 6951 | TCCGAACAAAACAAAGTATGG | 6952 |
| 188 | ANSHTNS | 6953 | GCAAACAGTCACACCAACTCT | 6954 |
| 189 | ATVKDSG | 6955 | GCAACCGTAAAAGACTCGGGG | 6956 |
| 190 | NGLSAST | 6957 | AATGGGCTGTCTGCTTCTACT | 6958 |
| 191 | VMASTGP | 6959 | GTAATGGCGTCAACAGGACCG | 6960 |
| 192 | VTTHSPV | 6961 | GTTACCACCCACAGTCCAGTT | 6962 |
| 193 | LSLNDVV | 6963 | CTGAGTTTGAATGATGTGGTT | 6964 |
| 194 | AHTEMSH | 6965 | GCCCACACCGAAATGTCTCAC | 6966 |
| 195 | DVAVSMI | 6967 | GATGTTGCTGTTTCTATGATT | 6968 |
| 196 | FPAGVGQ | 6969 | TTTCCGGCTGGTGTTGGGCAG | 6970 |
| 197 | VTTLSPV | 6971 | GTCACGACTTTGAGTCCAGTT | 6972 |
| 198 | LIGAALD | 6973 | CTAATCGGCGCAGCACTCGAC | 6974 |
| 199 | VLSSDLR | 6975 | GTGCTTTCGAGTGATCTTCGT | 6976 |
| 200 | QHGAEAR | 6977 | CAGCATGGGGCGGAGGCGAGG | 6978 |
| 201 | SHGSDPK | 6979 | TCTCATGGTTCTGATCCGAAG | 6980 |
| 202 | MNGGNVL | 6981 | ATGAACGGCGGCAACGTGCTC | 6982 |
| 203 | RVDSGLL | 6983 | AGGGTTGATAGTGGGCTGCTT | 6984 |
| 204 | IPSTGAQ | 6985 | ATTCCGAGTACGGGGGCGCAG | 6986 |
| 205 | VIAGLGF | 6987 | GTAATCGCAGGCTTAGGTTTC | 6988 |
| 206 | FGVSALS | 6989 | TTTGGTGTTAGTGCTCTTTCT | 6990 |
| 207 | SPAGLLA | 6991 | TCGCCGGCGGGGTTGCTTGCG | 6992 |
| 208 | STIPTPM | 6993 | TCCACAATCCCAACCCCCATG | 6994 |
| 209 | PKPSHGE | 6995 | CCGAAGCCTAGTCATGGTGAG | 6996 |
| 210 | DALSSLR | 6997 | GACGCTTTATCCAGCTTGCGA | 6998 |
| 211 | STDMRSP | 6999 | AGTACGGATATGAGGTCGCCG | 7000 |
| 212 | AVFSSQK | 7001 | GCTGTATTCTCCAGTCAAAAA | 7002 |
| 213 | RSEVNGV | 7003 | CGGAGTGAGGTGAATGGGGTT | 7004 |
| 214 | ATVAGQY | 7005 | GCTACCGTGGCAGGCCAATAC | 7006 |
| 215 | SVVVTAR | 7007 | TCGGTCGTCGTAACAGCTCGG | 7008 |
| 216 | GIDTSQP | 7009 | GGCATAGACACATCCCAACCC | 7010 |
| 217 | VVQVPGR | 7011 | GTAGTGCAAGTACCAGGACGC | 7012 |
| 218 | ITGVYDK | 7013 | ATAACTGGCGTTTACGACAAA | 7014 |
| 219 | VVDSYNL | 7015 | GTGGTAGACTCTTACAACTTA | 7016 |
| 220 | SLGEGRH | 7017 | AGTTTAGGCGAAGGGCGTCAC | 7018 |
| 221 | SIGLPAQ | 7019 | AGTATTGGGCTTCCTGCGCAG | 7020 |
| 222 | ASTVSTV | 7021 | GCCTCCACAGTAAGTACGGTC | 7022 |
| 223 | MEALAVT | 7023 | ATGGAAGCTTTGGCGGTAACA | 7024 |
| 224 | REISNLR | 7025 | CGGGAAATAAGCAACCTACGT | 7026 |
| 225 | VLDTVGN | 7027 | GTTCTGGATACGGTTGGTAAT | 7028 |
| 226 | AGLGSTS | 7029 | GCTGGTCTGGGGTCGACTAGT | 7030 |
| 227 | VEVPSTN | 7031 | GTTGAAGTCCCTTCTACGAAC | 7032 |
| 228 | VDHGGVV | 7033 | GTGGATCATGGTGGTGTGGTT | 7034 |
| 229 | GAHIVSA | 7035 | GGGGCGCACATAGTCTCCGCA | 7036 |
| 230 | TSREELR | 7037 | ACAAGTAGGGAAGAATTGCGA | 7038 |
| 231 | NGSDTTM | 7039 | AATGGTTCTGATACTACTATG | 7040 |
| 232 | KNPGVDT | 7041 | AAAAACCCTGGAGTTGACACG | 7042 |
| 233 | THDKLSV | 7043 | ACTCATGATAAGCTTAGTGTT | 7044 |
| 234 | NADYGGD | 7045 | AATGCTGATTATGGGGGTGAT | 7046 |
| 235 | ILATETS | 7047 | ATCCTAGCCACAGAAACCAGC | 7048 |
| 236 | TTMADPA | 7049 | ACAACAATGGCGGACCCCGCC | 7050 |
| 237 | VTEHTQF | 7051 | GTGACTGAGCATACGCAGTTT | 7052 |
| 238 | LTGISNV | 7053 | TTAACCGGCATCTCAAACGTA | 7054 |
| 239 | PVLAAAN | 7055 | CCTGTTCTTGCGGCAGCGAAC | 7056 |
| 240 | HATVVNS | 7057 | CATGCGACTGTTGTTAATTCG | 7058 |
| 241 | AMDNGAF | 7059 | GCTATGGATAATGGTGCTTTT | 7060 |
| 242 | SVNSIPV | 7061 | TCGGTCAACAGTATACCAGTC | 7062 |
| 243 | NLGVVPL | 7063 | AATTTGGGTGTGGTTCCGCTG | 7064 |
| 244 | QNSNGLL | 7065 | CAGAATAGTAATGGGCTTTTG | 7066 |
| 245 | ESSRLQI | 7067 | GAGAGTTCGCGTCTTCAGATT | 7068 |
| 246 | ERQLDSH | 7069 | GAGAGGCAGCTGGATTCGCAT | 7070 |
| 247 | ATTVSPV | 7071 | GCAACCACTGTGAGCCCCGTA | 7072 |
| 248 | TPPPNGR | 7073 | ACGCCTCCTCCTAATGGTAGG | 7074 |
| 249 | QDGPAVK | 7075 | CAAGACGGCCCGGCAGTTAAA | 7076 |
| 250 | VGVNGSH | 7077 | GTGGGTGTGAATGGTTCTCAT | 7078 |
| 251 | TVPNTVL | 7079 | ACAGTACCCAACACAGTCCTT | 7080 |
| 252 | HGVSIEL | 7081 | CATGGTGTTTCGATTGAGCTG | 7082 |
| 253 | SSQGTTK | 7083 | TCTTCGCAGGGTACGACTAAG | 7084 |
| 254 | TVGHDNK | 7085 | ACCGTAGGACACGACAACAAA | 7086 |
| 255 | QGGHSGG | 7087 | CAGGGTGGTCATAGTGGGGGT | 7088 |
| 256 | LTDGTVV | 7089 | CTTACTGATGGGACTGTTGTT | 7090 |
| 257 | VGASTAW | 7091 | GTGGGCGCCAGCACCGCGTGG | 7092 |
| 258 | VSRGEEM | 7093 | GTAAGCCGCGGCGAAGAAATG | 7094 |
| 259 | SIYDNDT | 7095 | TCCATCTACGACAACGACACC | 7096 |
| 260 | RETVDST | 7097 | CGTGAGACTGTGGATAGTACT | 7098 |
| 261 | STEGAAL | 7099 | AGTACGGAGGGGGCGGCTCTG | 7100 |
| 262 | ASREVIY | 7101 | GCATCGAGAGAAGTCATCTAC | 7102 |
| 263 | TEALAVK | 7103 | ACAGAAGCACTTGCGGTAAAA | 7104 |
| 264 | PTPGTLR | 7105 | CCGACACCAGGAACTTTAAGA | 7106 |
| 265 | GSGGVSV | 7107 | GGTTCGGGTGGTGTTAGTGTG | 7108 |
| 266 | PTQGVSM | 7109 | CCAACCCAAGGAGTTTCGATG | 7110 |
| 267 | VRQLDSN | 7111 | GTAAGACAACTTGACTCTAAC | 7112 |
| 268 | MGVLTTV | 7113 | ATGGGGGTGTTGACTACGGTG | 7114 |
| 269 | SLSDGSL | 7115 | TCTCTGTCTGATGGTTCTCTT | 7116 |
| 270 | HSEGVGR | 7117 | CACTCGGAAGGAGTCGGACGC | 7118 |
| 271 | WNLDMNN | 7119 | TGGAACCTAGACATGAACAAC | 7120 |
| 272 | LGHKAGD | 7121 | TTGGGGCATAAGGCTGGTGAT | 7122 |
| 273 | NLGVVNL | 7123 | AACTTAGGCGTCGTCAACCTT | 7124 |
| 274 | SGGRITD | 7125 | AGCGGAGGGCGCATCACCGAC | 7126 |
| 275 | TVITGAP | 7127 | ACTGTGATCACTGGCGCCCCC | 7128 |
| 276 | SQLAELV | 7129 | AGTCAGTTGGCGGAGCTGGTT | 7130 |
| 277 | SVTDVRH | 7131 | TCTGTTACTGATGTTAGGCAT | 7132 |
| 278 | DVAGSMR | 7133 | GATGTTGCTGGTTCTATGCGT | 7134 |
| 279 | VVQAPGR | 7135 | GTTGTTCAGGCTCCTGGGCGT | 7136 |
| 280 | NLGAALS | 7137 | AATCTGGGTGCGGCGCTTTCT | 7138 |
| 281 | KYSGAES | 7139 | AAATACTCTGGCGCGGAATCT | 7140 |
| 282 | VSATLGQ | 7141 | GTATCAGCCACACTAGGCCAA | 7142 |
| 283 | AGVSELL | 7143 | GCGGGTGTTTCTGAGTTGTTG | 7144 |
| 284 | PLLGNTI | 7145 | CCGCTTTTGGGGAATACGATT | 7146 |
| 285 | TAGLSHP | 7147 | ACCGCAGGATTGTCACACCCT | 7148 |
| 286 | RSNSAEW | 7149 | AGATCGAACTCCGCGGAATGG | 7150 |
| 287 | DTGVGTR | 7151 | GATACTGGGGTTGGTACGCGT | 7152 |
| 288 | PLILSPS | 7153 | CCCTTGATCTTATCTCCAAGT | 7154 |
| 289 | SVNQAVT | 7155 | TCTGTGAATCAGGCGGTTACG | 7156 |
| 290 | AHGERLS | 7157 | GCTCACGGAGAAAGACTTAGC | 7158 |
| 291 | TLASSER | 7159 | ACTTTGGCGAGTTCTGAGCGG | 7160 |
| 292 | VHDSTPL | 7161 | GTGCATGATTCGACTCCGTTG | 7162 |
| 293 | HAAGASS | 7163 | CATGCGGCGGGTGCTAGTAGT | 7164 |
| 294 | GNGTGVL | 7165 | GGAAACGGCACCGGGGTCCTA | 7166 |
| 295 | VLTSPGP | 7167 | GTGCTCACAAGCCCGGGACCG | 7168 |
| 296 | LSTGAQM | 7169 | TTATCAACCGGAGCTCAAATG | 7170 |
| 297 | MIASGLS | 7171 | ATGATTGCGTCGGGTTTGTCG | 7172 |
| 298 | RYDVEST | 7173 | CGGTATGATGTTGAGTCTACG | 7174 |
| 299 | VLVGTSL | 7175 | GTTCTTGTTGGGACGAGTTTG | 7176 |
| 300 | LNTTESK | 7177 | CTTAACACCACCGAAAGCAAA | 7178 |
| 301 | SNIPTLM | 7179 | TCGAACATCCCGACATTAATG | 7180 |
| 302 | VLGGPAV | 7181 | GTGCTGGGTGGTCCTGCGGTG | 7182 |
| 303 | VIGGLGI | 7183 | GTTATTGGTGGGCTTGGGATT | 7184 |
| 304 | DLASAGH | 7185 | GATCTGGCGAGTGCTGGGCAT | 7186 |
| 305 | SVTDIKH | 7187 | TCGGTGACGGACATAAAACAC | 7188 |
| 306 | TNHQEPN | 7189 | ACGAATCATCAGGAGCCTAAT | 7190 |
| 307 | VLNEHVA | 7191 | GTCCTTAACGAACACGTAGCT | 7192 |
| 308 | HNTGMDM | 7193 | CATAATACGGGGATGGATATG | 7194 |
| 309 | GRSQLPM | 7195 | GGCCGATCACAACTTCCAATG | 7196 |
| 310 | DSGKDRT | 7197 | GATTCTGGTAAGGATCGTACG | 7198 |
| 311 | LLAGISI | 7199 | TTGCTTGCTGGGATTAGTATT | 7200 |
| 312 | TDVVLHK | 7201 | ACTGACGTCGTATTACACAAA | 7202 |
| 313 | VIETRLS | 7203 | GTCATCGAAACTCGCCTTTCC | 7204 |
| 314 | FGAELHK | 7205 | TTTGGGGCTGAGTTGCATAAG | 7206 |
| 315 | SHGTDSK | 7207 | AGTCACGGCACGGACTCTAAA | 7208 |
| 316 | AVDSSVR | 7209 | GCTGTTGACTCCAGCGTTAGA | 7210 |
| 317 | PNQGTLR | 7211 | CCTAATCAGGGGACGCTTCGG | 7212 |
| 318 | VVSVTAS | 7213 | GTGGTGTCGGTTACGGCTAGT | 7214 |
| 319 | VNVSYGD | 7215 | GTGAATGTTTCGTATGGTGAT | 7216 |
| 320 | VTTVYPV | 7217 | GTTACGACAGTATACCCGGTA | 7218 |
| 321 | QYVVSGA | 7219 | CAGTATGTTGTTAGTGGTGCG | 7220 |
| 322 | VLSGEVL | 7221 | GTCTTGTCTGGAGAAGTCCTT | 7222 |
| 323 | AAGVILN | 7223 | GCGGCGGGTGTTATTCTGAAT | 7224 |
| 324 | SMTSESS | 7225 | TCAATGACTTCGGAATCGTCT | 7226 |
| 325 | ILVDTHA | 7227 | ATTCTGGTTGATACTCATGCG | 7228 |
| 326 | YVTFGEN | 7229 | TACGTAACCTTCGGTGAAAAC | 7230 |
| 327 | NSDLMGR | 7231 | AACAGTGACCTAATGGGCCGA | 7232 |
| 328 | IVDYQGK | 7233 | ATCGTAGACTACCAAGGCAAA | 7234 |
| 329 | PHQGSES | 7235 | CCTCATCAGGGTAGTGAGAGT | 7236 |
| 330 | LSRGEEK | 7237 | CTTTCGAGGGGTGAGGAGAAG | 7238 |
| 331 | LSRDVAV | 7239 | TTGTCGAGGGATGTGGCGGTT | 7240 |
| 332 | PTQGTLR | 7241 | CCAACGCAAGGTACCTTGCGA | 7242 |
| 333 | REQQKYW | 7243 | CGGGAACAACAAAAATACTGG | 7244 |
| 334 | EQSMGSP | 7245 | GAGCAGTCTATGGGTTCTCCG | 7246 |
| 335 | KGSETPM | 7247 | AAAGGGTCAGAAACACCGATG | 7248 |
| 336 | KEYITAV | 7249 | AAAGAATACATAACAGCGGTA | 7250 |
| 337 | HGTLESQ | 7251 | CACGGCACCCTCGAATCGCAA | 7252 |
| 338 | ESLAGVR | 7253 | GAGAGTCTTGCTGGTGTTAGG | 7254 |
| 339 | NDRNTSS | 7255 | AATGATAGGAATACGTCTTCG | 7256 |
| 340 | AAVSALL | 7257 | GCCGCAGTATCCGCACTATTA | 7258 |
| 341 | LRVTENP | 7259 | CTTCGGGTCACCGAAAACCCC | 7260 |
| 342 | IAILAAS | 7261 | ATTGCGATTCTTGCTGCTTCG | 7262 |
| 343 | MLTGIAT | 7263 | ATGTTGACGGGGATTGCTACT | 7264 |
| 344 | STIPALM | 7265 | AGTACTATTCCTGCTCTGATG | 7266 |
| 345 | AAREVIN | 7267 | GCGGCTCGGGAGGTGATTAAT | 7268 |
| 346 | IVMAEVH | 7269 | ATCGTAATGGCCGAAGTACAC | 7270 |
| 347 | LVVDASR | 7271 | TTGGTAGTAGACGCAAGTCGC | 7272 |
| 348 | HQHMVEG | 7273 | CACCAACACATGGTTGAAGGA | 7274 |
| 349 | ENSGGHF | 7275 | GAGAATAGTGGGGGTCATTTT | 7276 |
| 350 | YSMTVTT | 7277 | TATAGTATGACGGTTACGACT | 7278 |
| 351 | SHASDSK | 7279 | TCGCACGCATCAGACTCTAAA | 7280 |
| 352 | AVSDYTV | 7281 | GCCGTGAGCGACTACACAGTC | 7282 |
| 353 | STIPTLL | 7283 | AGTACTATTCCTACTCTGTTG | 7284 |
| 354 | SPSAFPK | 7285 | TCCCCTTCAGCATTCCCAAAA | 7286 |
| 355 | NFGEVQL | 7287 | AATTTTGGTGAGGTTCAGCTG | 7288 |
| 356 | GIETRGL | 7289 | GGAATCGAAACACGCGGTCTC | 7290 |
| 357 | NVNQDSL | 7291 | AACGTAAACCAAGACTCACTC | 7292 |
| 358 | AGLLTKV | 7293 | GCAGGACTCCTTACAAAAGTA | 7294 |
| 359 | LSIRQGP | 7295 | TTGAGTATTCGTCAGGGTCCT | 7296 |
| 360 | PALQGNF | 7297 | CCGGCTCTTCAGGGTAATTTT | 7298 |
| 361 | LDSGIPR | 7299 | CTCGACTCTGGTATCCCCAGA | 7300 |
| 362 | SYSDGSS | 7301 | TCATACTCGGACGGCAGCAGC | 7302 |
| 363 | FQDTIGV | 7303 | TTTCAGGATACGATTGGGGTG | 7304 |
| 364 | VLLGIDR | 7305 | GTTTTGCTAGGAATCGACCGT | 7306 |
| 365 | SHGYDSK | 7307 | TCTCATGGTTATGATTCGAAG | 7308 |
| 366 | SVDTGLL | 7309 | AGCGTCGACACGGGCCTCTTA | 7310 |
| 367 | EGGGAQR | 7311 | GAGGGGGGTGGGGCTCAGAGG | 7312 |
| 368 | AALSQEF | 7313 | GCGGCCCTGTCTCAAGAATTC | 7314 |
| 369 | NSISLIN | 7315 | AACTCTATCAGCCTCATAAAC | 7316 |
| 370 | LSRGEEM | 7317 | CTTTCGAGGGGTGAGGAGATG | 7318 |
| 371 | IGMSAST | 7319 | ATAGGTATGAGCGCGTCCACC | 7320 |
| 372 | MGSDTTM | 7321 | ATGGGTTCTGATACTACTATG | 7322 |
| 373 | SLVLTSH | 7323 | TCATTAGTCCTTACGAGCCAC | 7324 |
| 374 | LGGDAVA | 7325 | CTAGGAGGAGACGCAGTTGCA | 7326 |
| 375 | PIQGTLR | 7327 | CCTATTCAGGGGACGCTTCGG | 7328 |
| 376 | RVELALT | 7329 | AGAGTCGAACTTGCCTTAACA | 7330 |
| 377 | VDHGGVH | 7331 | GTTGACCACGGAGGGGTCCAC | 7332 |
| 378 | IASDIGR | 7333 | ATTGCTTCGGATATTGGTCGG | 7334 |
| 379 | PNERLAV | 7335 | CCTAACGAACGATTGGCAGTC | 7336 |
| 380 | DLSTFPV | 7337 | GACCTCTCGACATTCCCTGTA | 7338 |
| 381 | DSSKAEW | 7339 | GATAGTAGTAAGGCTGAGTGG | 7340 |
| 382 | GAFAPAT | 7341 | GGCGCATTCGCACCAGCAACA | 7342 |
| 383 | TMSLSLR | 7343 | ACTATGTCTCTGTCGTTGCGT | 7344 |
| 384 | VDDIKSW | 7345 | GTTGACGACATAAAATCCTGG | 7346 |
| 385 | TTLADHA | 7347 | ACTACTCTGGCTGATCATGCG | 7348 |
| 386 | KSDVEYL | 7349 | AAATCAGACGTCGAATACCTA | 7350 |
| 387 | MNGGYVL | 7351 | ATGAACGGCGGATACGTACTT | 7352 |
| 388 | MAVDVTK | 7353 | ATGGCAGTCGACGTAACCAAA | 7354 |
| 389 | TDALTSK | 7355 | ACAGACGCACTCACCAGTAAA | 7356 |
| 390 | AAGGILN | 7357 | GCGGCGGGTGGTATTCTGAAT | 7358 |
| 391 | LSEGRAY | 7359 | CTTAGTGAGGGTCGTGCGTAT | 7360 |
| 392 | SVSHVVV | 7361 | TCGGTCTCTCACGTCGTCGTA | 7362 |
| 393 | FISGALT | 7363 | TTCATATCCGGCGCCTTAACT | 7364 |
| 394 | VTGLTVQ | 7365 | GTTACCGGGCTGACAGTACAA | 7366 |
| 395 | HSASLIE | 7367 | CACTCAGCATCCCTCATAGAA | 7368 |
| 396 | ITQAVYI | 7369 | ATCACACAAGCGGTATACATC | 7370 |
| 397 | ASMSAEH | 7371 | GCTAGTATGTCTGCGGAGCAT | 7372 |
| 398 | SVTDVNH | 7373 | TCTGTTACTGATGTTAATCAT | 7374 |
| 399 | LGTSDVR | 7375 | TTGGGGACGAGTGATGTGCGT | 7376 |
| 400 | QSNHAPV | 7377 | CAATCAAACCACGCCCCGGTC | 7378 |
| 401 | SMAVTAK | 7379 | AGTATGGCGGTGACGGCGAAG | 7380 |
| 402 | RMTGDLT | 7381 | CGTATGACTGGAGACCTAACC | 7382 |
| 403 | SHGSDPK | 7383 | AGCCACGGGTCAGACCCTAAA | 7384 |
| 404 | GLGDSGE | 7385 | GGGTTGGGGGATTCGGGTGAG | 7386 |
| 405 | SVTLLGV | 7387 | AGTGTGACTCTGTTGGGTGTG | 7388 |
| 406 | PNDGPSK | 7389 | CCTAATGATGGGCCTAGTAAG | 7390 |
| 407 | FDSAPRY | 7391 | TTTGATTCTGCGCCGCGGTAT | 7392 |
| 408 | VVDAYNL | 7393 | GTCGTAGACGCTTACAACTTA | 7394 |
| 409 | NEAVNVR | 7395 | AATGAGGCTGTTAATGTTCGG | 7396 |
| 410 | TLALSER | 7397 | ACCTTAGCCTTATCAGAACGA | 7398 |
| 411 | LRDSAEP | 7399 | CTCCGAGACTCAGCGGAACCA | 7400 |
| 412 | PDNNPRN | 7401 | CCTGATAATAATCCGCGGAAT | 7402 |
| 413 | YHASDSK | 7403 | TATCATGCTTCTGATTCGAAG | 7404 |
| 414 | KGYDTNM | 7405 | AAAGGCTACGACACAAACATG | 7406 |
| 415 | HTTGAEM | 7407 | CACACTACTGGGGCCGAAATG | 7408 |
| 416 | GLNDNVA | 7409 | GGTCTGAATGATAATGTGGCG | 7410 |
| 417 | PQLIVPK | 7411 | CCTCAGCTTATTGTTCCTAAG | 7412 |
| 418 | IIVDNGS | 7413 | ATAATAGTCGACAACGGATCA | 7414 |
| 419 | QNESGMK | 7415 | CAAAACGAAAGCGGGATGAAA | 7416 |
| 420 | NQLGELV | 7417 | AACCAACTCGGCGAACTAGTG | 7418 |
| 421 | RDLTSDM | 7419 | AGAGACTTGACTTCGGACATG | 7420 |
| 422 | GVSVLNV | 7421 | GGGGTGAGTGTGCTGAATGTT | 7422 |
| 423 | AADSSGR | 7423 | GCGGCGGATAGTTCTGGGCGG | 7424 |
| 424 | ALNEHEA | 7425 | GCTCTGAATGAGCATGAGGCG | 7426 |
| 425 | LRVTENQ | 7427 | TTGCGTGTGACGGAGAATCAG | 7428 |
| 426 | MTVPGSP | 7429 | ATGACGGTTCCGGGTAGTCCG | 7430 |
| 427 | TLAITER | 7431 | ACTTTGGCGATTACTGAGCGG | 7432 |
| 428 | KNPGVDT | 7433 | AAGAATCCGGGGGTGGATACT | 7434 |
| 429 | RVALDET | 7435 | AGGGTGGCGCTGGATGAGACG | 7436 |
| 430 | MNVGHVL | 7437 | ATGAATGTGGGTCATGTTCTG | 7438 |
| 431 | LRVTENK | 7439 | TTGCGTGTGACGGAGAATAAG | 7440 |
| 432 | TLGMSTR | 7441 | ACGTTGGGGATGTCTACTCGT | 7442 |
| 433 | REHSAQL | 7443 | AGGGAGCATTCGGCGCAGCTT | 7444 |
| 434 | HGNLVSQ | 7445 | CATGGGAATTTGGTGTCTCAG | 7446 |
| 435 | VQGPQTG | 7447 | GTGCAGGGTCCGCAGACTGGT | 7448 |
| 436 | VTTLTPV | 7449 | GTGACTACGCTTACTCCTGTG | 7450 |
| 437 | DSHVSGM | 7451 | GATAGTCATGTGTCGGGGATG | 7452 |
| 438 | LVTPMHM | 7453 | CTCGTAACTCCCATGCACATG | 7454 |
| 439 | RVDSEKL | 7455 | AGGGTGGATTCGGAGAAGCTT | 7456 |
| 440 | RPEIEVR | 7457 | CGGCCGGAGATTGAGGTTAGG | 7458 |
| 441 | QDGPAEK | 7459 | CAGGATGGGCCTGCGGAGAAG | 7460 |
| 442 | MVTPTNT | 7461 | ATGGTTACTCCTACGAATACG | 7462 |
| 443 | LSKGSQL | 7463 | CTGTCTAAGGGGTCGCAGCTG | 7464 |
| 444 | VIVLTEA | 7465 | GTGATTGTGTTGACGGAGGCT | 7466 |
| 445 | QSLTDGV | 7467 | CAGAGTTTGACTGATGGGGTT | 7468 |
| 446 | MNGAHVL | 7469 | ATGAATGGGGCTCATGTTCTG | 7470 |
| 447 | RVALDLT | 7471 | AGGGTGGCGCTGGATTTGACG | 7472 |
| 448 | SQSAFPN | 7473 | AGTCAGTCGGCTTTTCCTAAT | 7474 |
| 449 | LTRGEEK | 7475 | CTTACGAGGGGTGAGGAGAAG | 7476 |
| 450 | MGASDTL | 7477 | ATGGGGGCTAGTGATACGCTT | 7478 |
| 451 | NQLAELV | 7479 | AATCAGTTGGCGGAGCTGGTT | 7480 |
| 452 | LGDSADQ | 7481 | CTTGGGGATTCTGCTGATCAG | 7482 |
| 453 | GVSVLND | 7483 | GGGGTGAGTGTGCTGAATGAT | 7484 |
| 454 | TTAAIVK | 7485 | ACGACGGCGGCTATTGTTAAG | 7486 |
| 455 | MGASDTH | 7487 | ATGGGGGCTAGTGATACGCAT | 7488 |
| 456 | DLNEHVA | 7489 | GATCTGAATGAGCATGTGGCG | 7490 |
| 457 | MNGGHAL | 7491 | ATGAATGGGGGTCATGCTCTG | 7492 |
| 458 | SNGLPAQ | 7493 | AGTAATGGGCTTCCTGCGCAG | 7494 |
| 459 | TTTGNLM | 7495 | ACGACGACGGGGAATCTTATG | 7496 |
| 460 | LAGSTGP | 7497 | TTGGCGGGGTCGACGGGTCCG | 7498 |
| 461 | AVKEYEL | 7499 | GCCGTTAAAGAATACGAACTC | 7500 |
| 462 | VIAGHGN | 7501 | GTTATTGCTGGGCATGGGAAT | 7502 |
| 463 | LGDSAET | 7503 | CTTGGGGATTCTGCTGAGACG | 7504 |
| 464 | MVTPTNK | 7505 | ATGGTTACTCCTACGAATAAG | 7506 |
| 465 | AIVSIAR | 7507 | GCGATTGTGTCGATTGCTCGG | 7508 |
| 466 | SPTSSPT | 7509 | TCTCCGACGAGTTCGCCGACT | 7510 |
| 467 | ESRNDVV | 7511 | GAGTCGAGGAATGATGTTGTT | 7512 |
| 468 | TGSSAML | 7513 | ACGGGGAGTTCGGCGATGCTT | 7514 |
| 469 | TVNSIPV | 7515 | ACGGTCAACAGTATACCAGTC | 7516 |
| 470 | ITENASR | 7517 | ATTACTGAGAATGCGTCGCGG | 7518 |
| 471 | PILGAST | 7519 | CCGATTCTTGGTGCTAGTACG | 7520 |
| 472 | GGKGEGP | 7521 | GGTGGGAAGGGTGAGGGTCCG | 7522 |
| 473 | IVMDENH | 7523 | ATCGTAATGGACGAAAACCAC | 7524 |
| 474 | MGASVTL | 7525 | ATGGGGGCTAGTGTTACGCTT | 7526 |
| 475 | AVKEYEA | 7527 | GCGGTGAAGGAGTATGAGGCG | 7528 |
| 476 | TVGLSIA | 7529 | ACTGTGGGTTTGTCGATTGCG | 7530 |
| 477 | QVIDTKT | 7531 | CAGGTGATTGATACTAAGACT | 7532 |
| 478 | DVVLLTR | 7533 | GATGTTGTTTTGTTGACTAGG | 7534 |
| 479 | DVRGSDI | 7535 | GACGTACGGGGGTCTGACATC | 7536 |
| 480 | FAEVAQA | 7537 | TTTGCGGAGGTTGCGCAGGCG | 7538 |
| 481 | TSLLPQT | 7539 | ACGTCTCTGCTTCCTCAGACT | 7540 |
| 482 | AADSSAR | 7541 | GCGGCGGATAGTTCTGCGCGG | 7542 |
| 483 | LGDSAES | 7543 | CTTGGGGATTCTGCTGAGTCG | 7544 |
| 484 | SVDSGLL | 7545 | AGTGTTGATAGTGGGCTGCTT | 7546 |
| 485 | GRDLTPA | 7547 | GGTCGGGATCTTACGCCTGCT | 7548 |
| 486 | PAREVLY | 7549 | CCGGCTCGGGAGGTGCTTTAT | 7550 |
| 487 | GSDIKHE | 7551 | GGTTCTGATATTAAGCATGAG | 7552 |
| 488 | LAGSPGP | 7553 | TTGGCGGGGTCGCCGGGTCCG | 7554 |
| 489 | DVTVSMR | 7555 | GATGTTACTGTTTCTATGCGT | 7556 |
| 490 | RVDSGQL | 7557 | AGGGTGGATTCGGGGCAGCTT | 7558 |
| 491 | MNGGNVM | 7559 | ATGAATGGGGGTAATGTTATG | 7560 |
| 492 | PQLIVPA | 7561 | CCTCAGCTTATTGTTCCTGCG | 7562 |
| 493 | VTTHTPV | 7563 | GTGACTACGCATACTCCTGTG | 7564 |
| 494 | MQITGLH | 7565 | ATGCAGATTACTGGTCTTCAT | 7566 |
| 495 | AAREELN | 7567 | GCGGCTCGGGAGGAGCTTAAT | 7568 |
| 496 | AAREVLM | 7569 | GCGGCTCGGGAGGTGCTTATG | 7570 |
| 497 | PGGHYQA | 7571 | CCGGGTGGGCATTATCAGGCT | 7572 |
| 498 | EVAGTYS | 7573 | GAGGTGGCTGGGACGTATTCT | 7574 |
| 499 | VVDSNNL | 7575 | GTTGTTGATTCGAATAATCTG | 7576 |
| 500 | VRQLDSL | 7577 | GTGAGGCAGCTGGATTCGCTG | 7578 |
| 501 | QVTDTKT | 7579 | CAGGTGACTGATACTAAGACT | 7580 |
| 502 | VNDGLGI | 7581 | GTTAATGATGGGCTTGGGATT | 7582 |
| 503 | TTSANLM | 7583 | ACGACGTCGGCGAATCTTATG | 7584 |
| 504 | GSHVSGD | 7585 | GGTAGTCATGTGTCGGGGGAT | 7586 |
| 505 | GRSQLPM | 7587 | GGGCGGTCGCAGTTGCCGATG | 7588 |
| 506 | TVLAASH | 7589 | ACGGTGTTGGCTGCGTCTCAT | 7590 |
| 507 | SPSAFPN | 7591 | AGTCCGTCGGCTTTTCCTAAT | 7592 |
| 508 | QSMTDGV | 7593 | CAGAGTATGACTGATGGGGTT | 7594 |
| 509 | QSLSKDK | 7595 | CAGAGTCTTAGTAAGGATAAG | 7596 |
| 510 | REALSVT | 7597 | AGGGAGGCGCTGTCTGTGACG | 7598 |
| 511 | VIAGHGI | 7599 | GTTATTGCTGGGCATGGGATT | 7600 |
| 512 | MNGGHVI | 7601 | ATGAATGGGGGTCATGTTATT | 7602 |
| 513 | NQLAEQV | 7603 | AATCAGTTGGCGGAGCAGGTT | 7604 |
| 514 | PAREVHY | 7605 | CCGGCTCGGGAGGTGCATTAT | 7606 |
| 515 | VLASLGP | 7607 | GTTCTGGCTTCGCTTGGTCCT | 7608 |
| 516 | PARELHY | 7609 | CCGGCTCGGGAGCTGCATTAT | 7610 |
| 517 | MSITEPR | 7611 | ATGTCTATTACTGAGCCGCGG | 7612 |
| 518 | AAGVIPN | 7613 | GCGGCGGGTGTTATTCCGAAT | 7614 |
| 519 | VTRGTGN | 7615 | GTTACTCGTGGTACGGGTAAT | 7616 |
| 520 | GVGVLNV | 7617 | GGGGTGGGTGTGCTGAATGTT | 7618 |
| 521 | QSPGSQL | 7619 | CAGTCTCCGGGGTCGCAGCTG | 7620 |
| 522 | RPEIAGR | 7621 | CGGCCGGAGATTGCGGGTAGG | 7622 |
| 523 | PILGASS | 7623 | CCGATTCTTGGTGCTAGTTCG | 7624 |
| 524 | RVDSEQL | 7625 | AGGGTGGATTCGGAGCAGCTT | 7626 |
| 525 | TTYDTLV | 7627 | ACGACGTATGATACGTTGGTT | 7628 |
| 526 | VFVEKSA | 7629 | GTTTTTGTTGAGAAGAGTGCG | 7630 |
| 527 | VGSLTAS | 7631 | GTGGGGTCGCTTACGGCTAGT | 7632 |
| 528 | QNMGVTQ | 7633 | CAGAATATGGGGGTGACTCAG | 7634 |
| 529 | GVSVPNV | 7635 | GGGGTGAGTGTGCCGAATGTT | 7636 |
| 530 | GSRENAR | 7637 | GGGAGTAGGGAGAATGCGCGT | 7638 |
| 531 | PGEHYEA | 7639 | CCGGGTGAGCATTATGAGGCT | 7640 |
| 532 | AVGVILN | 7641 | GCGGTGGGTGTTATTCTGAAT | 7642 |
| 533 | TLAINER | 7643 | ACTTTGGCGATTAATGAGCGG | 7644 |
| 534 | MNGGHVL | 7645 | ATGAATGGGGGTCATGTTCTG | 7646 |
| 535 | LGGVSSE | 7647 | CTGGGGGGTGTGTCGTCTGAG | 7648 |
| 536 | TVGLTIA | 7649 | ACTGTGGGTTTGACGATTGCG | 7650 |
| 537 | WNGRETT | 7651 | TGGAATGGTCGGGAGACTACT | 7652 |
| 538 | RHVHVEG | 7653 | CGCCACGTACACGTCGAAGGC | 7654 |
| 539 | DSRVSGD | 7655 | GATAGTCGTGTGTCGGGGGAT | 7656 |
| 540 | RPEIAVR | 7657 | CGGCCGGAGATTGCGGTTAGG | 7658 |
| 541 | DVSVSMR | 7659 | GATGTTTCTGTTTCTATGCGT | 7660 |
| 542 | IVTPTNT | 7661 | ATTGTTACTCCTACGAATACG | 7662 |
| 543 | SPTSSPP | 7663 | TCTCCGACGAGTTCGCCGCCT | 7664 |
| 544 | NHGTDSK | 7665 | AACCACGGAACAGACTCTAAA | 7666 |
| 545 | KNPGVDS | 7667 | AAGAATCCGGGGGTGGATTCT | 7668 |
| 546 | PDRHGGL | 7669 | CCTGATCGGCATGGTGGGCTG | 7670 |
| 547 | VVDSDNL | 7671 | GTTGTTGATTCGGATAATCTG | 7672 |
| 548 | NQLGELV | 7673 | AATCAGTTGGGGGAGCTGGTT | 7674 |
| 549 | NQLAEPV | 7675 | AATCAGTTGGCGGAGCCGGTT | 7676 |
| 550 | WIGRETT | 7677 | TGGATTGGTCGGGAGACTACT | 7678 |
| 551 | SGAPLRL | 7679 | TCTGGGGCGCCGCTTAGGCTT | 7680 |
| 552 | VLLGINM | 7681 | GTGCTTTTGGGTATTAATATG | 7682 |
| 553 | SHGYDSK | 7683 | TCGCACGGCTACGACTCTAAA | 7684 |
| 554 | PGAHYQA | 7685 | CCGGGTGCGCATTATCAGGCT | 7686 |
| 555 | ASESSPP | 7687 | GCATCAGAATCATCACCACCC | 7688 |
| 556 | QNVGVTQ | 7689 | CAGAATGTGGGGGTGACTCAG | 7690 |
| 557 | GEQQKVW | 7691 | GGTGAGCAGCAGAAGGTTTGG | 7692 |
| 558 | AQAQTGW | 7693 | GCTCAAGCACAGACCGGCTGG | 7694 |
| 559 | STLHTTT | 7695 | AGTACTCTTCATACTACGACT | 7696 |
| 560 | AVLSQNL | 7697 | GCTGTGTTGTCTCAGAATCTT | 7698 |
| 561 | GAVSSTK | 7699 | GGTGCTGTTTCTTCGACTAAG | 7700 |
| 562 | PTQETLR | 7701 | CCTACTCAGGAGACGCTTCGG | 7702 |
| 563 | QYVVSGV | 7703 | CAGTATGTTGTTAGTGGTGTG | 7704 |
| 564 | LAGLGGP | 7705 | CTTGCGGGTTTGGGGGGGCCT | 7706 |
| 565 | QTMKDFY | 7707 | CAGACGATGAAGGATTTTTAT | 7708 |
| 566 | VGSVMAS | 7709 | GTGGGGTCGGTTATGGCTAGT | 7710 |
| 567 | AHIGTLT | 7711 | GCACACATCGGAACTCTCACC | 7712 |
| 568 | MVTPTIT | 7713 | ATGGTTACTCCTACGATTACG | 7714 |
| 569 | MLTPTNT | 7715 | ATGCTTACTCCTACGAATACG | 7716 |
| 570 | TGDRDQN | 7717 | ACTGGTGATCGGGATCAGAAT | 7718 |
| 571 | GGVSSTN | 7719 | GGTGGTGTTTCTTCGACTAAT | 7720 |
| 572 | LSNHGPI | 7721 | CTGAGTAATCATGGGCCTATT | 7722 |
| 573 | ALTNGQR | 7723 | GCACTAACCAACGGTCAACGT | 7724 |
| 574 | NQLSELV | 7725 | AATCAGTTGTCGGAGCTGGTT | 7726 |
| 575 | GALTSTK | 7727 | GGTGCTCTTACTTCGACTAAG | 7728 |
| 576 | VGSVTAS | 7729 | GTGGGGTCGGTTACGGCTAGT | 7730 |
| 577 | VLASHGT | 7731 | GTTCTGGCTTCGCATGGTACT | 7732 |
| 578 | AVKEYET | 7733 | GCGGTGAAGGAGTATGAGACG | 7734 |
| 579 | RGGVSTE | 7735 | CGGGGGGGTGTGTCGACTGAG | 7736 |
| 580 | SGGKEEM | 7737 | AGTGGGGGTAAGGAGGAGATG | 7738 |
| 581 | HGTLVSQ | 7739 | CATGGGACTTTGGTGTCTCAG | 7740 |
| 582 | LMNDLLS | 7741 | CTTATGAACGACTTACTCTCC | 7742 |
| 583 | DAPRDGA | 7743 | GACGCACCCCGCGACGGGGCT | 7744 |
| 584 | RTTEPRF | 7745 | CGTACTACGGAGCCTCGTTTT | 7746 |
| 585 | TLPELNL | 7747 | ACGTTGCCGGAGTTGAATCTT | 7748 |
| 586 | LTKSTEW | 7749 | CTCACCAAATCCACAGAATGG | 7750 |
| 587 | QVPDNKT | 7751 | CAGGTGCCTGATAATAAGACT | 7752 |
| 588 | QGGDSGG | 7753 | CAGGGTGGTGATAGTGGGGGT | 7754 |
| 589 | LSTGEEM | 7755 | CTTTCGACGGGTGAGGAGATG | 7756 |
| 590 | PEPRSSY | 7757 | CCTGAGCCGCGTAGTAGTTAT | 7758 |
| 591 | LISTTLR | 7759 | TTGATTTCTACTACGCTGCGT | 7760 |
| 592 | RVTPTNT | 7761 | CGCGTGACGCCAACTAACACT | 7762 |
| 593 | HKDRTTL | 7763 | CATAAGGATAGGACGACGCTT | 7764 |
| 594 | STEYAML | 7765 | TCTACTGAGTATGCGATGTTG | 7766 |
| 595 | NLGAELS | 7767 | AACTTGGGGGCAGAACTATCG | 7768 |
| 596 | QNGLQLL | 7769 | CAGAATGGGTTGCAGCTTTTG | 7770 |
| 597 | LISGTLR | 7771 | TTGATTTCTGGTACGCTGCGT | 7772 |
| 598 | ANQNVII | 7773 | GCAAACCAAAACGTAATAATA | 7774 |
| 599 | SPPPNAR | 7775 | AGCCCGCCGCCGAACGCGCGT | 7776 |
| 600 | SSADYQV | 7777 | AGTTCTGCGGATTATCAGGTT | 7778 |
| 601 | KQVSMES | 7779 | AAGCAGGTGTCGATGGAGTCG | 7780 |
| 602 | RVALDVT | 7781 | AGGGTGGCGCTGGATGTGACG | 7782 |
| 603 | LNMGPLH | 7783 | CTGAATATGGGTCCTTTGCAT | 7784 |
| 604 | IPRIHSL | 7785 | ATTCCTCGGATTCATTCTCTT | 7786 |
| 605 | IGSSLSP | 7787 | ATTGGGTCGTCGCTTAGTCCT | 7788 |
| 606 | LEKDPMT | 7789 | TTGGAAAAAGACCCTATGACT | 7790 |
| 607 | MVTNTNT | 7791 | ATGGTTACTAATACGAATACG | 7792 |
| 608 | RIASNLA | 7793 | AGGATTGCTTCTAATCTGGCG | 7794 |
| 609 | VVAGTNS | 7795 | GTCGTTGCAGGTACAAACTCG | 7796 |
| 610 | GVAATNS | 7797 | GGGGTGGCTGCGACGAATTCT | 7798 |
| 611 | KGSVTPM | 7799 | AAGGGTTCTGTTACTCCTATG | 7800 |
| 612 | HDTSASV | 7801 | CATGATACTAGTGCTAGTGTT | 7802 |
| 613 | SLAITER | 7803 | AGTTTGGCGATTACTGAGCGG | 7804 |
| 614 | HGRDALV | 7805 | CATGGGCGGGATGCTCTTGTG | 7806 |
| 615 | DIAGLGI | 7807 | GATATTGCCGGGCTTGGGATT | 7808 |
| 616 | ANQLAPV | 7809 | GCCAACCAATTGGCCCCCGTG | 7810 |
| 617 | NGASLAS | 7811 | AACGGAGCTTCCCTCGCAAGC | 7812 |
| 618 | *KMSAYV | 7813 | TGAAAGATGTCCGCTTATGTG | 7814 |
| 619 | GVAGRIL | 7815 | GGGGTGGCTGGGCGTATTCTG | 7816 |
| 620 | TLAISGR | 7817 | ACTTTGGCGATTTCTGGGCGG | 7818 |
| 621 | NLHTAEA | 7819 | AACCTCCACACTGCTGAAGCG | 7820 |
| 622 | SIAVGLS | 7821 | AGTATTGCGGTGGGTTTGTCG | 7822 |
| 623 | TGQQVSI | 7823 | ACTGGGCAGCAGGTTAGTATT | 7824 |
| 624 | LPRLGGL | 7825 | CTTCCGCGTTTGGGGGGGCTT | 7826 |
| 625 | DTASTQS | 7827 | GACACAGCATCTACTCAATCC | 7828 |
| 626 | PQLIVPV | 7829 | CCTCAGCTTATTGTTCCTGTG | 7830 |
| 627 | GLNDHVA | 7831 | GGTCTGAATGATCATGTGGCG | 7832 |
| 628 | RDEAYRA | 7833 | AGGGATGAGGCTTATCGTGCG | 7834 |
| 629 | RISPEGT | 7835 | CGTATATCACCGGAAGGCACT | 7836 |
| 630 | HSEGVGR | 7837 | CATAGTGAGGGTGTTGGGCGG | 7838 |
| 631 | KGSDNTM | 7839 | AAGGGTTCTGATAATACTATG | 7840 |
| 632 | LPNGGGF | 7841 | CTGCCGAATGGGGGGGGGTTT | 7842 |
| 633 | AVTNPLM | 7843 | GCGGTTACTAATCCTTTGATG | 7844 |
| 634 | VTVAGSV | 7845 | GTTACGGTGGCTGGTTCGGTG | 7846 |
| 635 | RDDQGIP | 7847 | CGGGATGATCAGGGGATTCCG | 7848 |
| 636 | HTLSTGV | 7849 | CACACCCTAAGCACGGGAGTA | 7850 |
| 637 | SGGTRGP | 7851 | TCTGGTGGGACTCGTGGTCCT | 7852 |
| 638 | RHIADAS | 7853 | AGACACATAGCGGACGCGTCG | 7854 |
| 639 | SGISFLA | 7855 | AGCGGAATCAGCTTCTTGGCT | 7856 |
| 640 | SALTQGY | 7857 | TCGGCGCTAACCCAAGGATAC | 7858 |
| 641 | LNGAPLL | 7859 | CTGAATGGTGCGCCGTTGCTG | 7860 |
| 642 | STVGINV | 7861 | AGTACGGTCGGGATCAACGTT | 7862 |
| 643 | QEQGTTT | 7863 | CAGGAGCAGGGTACGACTACT | 7864 |
| 644 | MIGGHVQ | 7865 | ATGATTGGGGGTCATGTTCAG | 7866 |
| 645 | RVLTSDV | 7867 | CGTGTTCTGACGTCTGATGTG | 7868 |
| 646 | GFGLTED | 7869 | GGGTTTGGGTTGACGGAGGAT | 7870 |
| 647 | DAQSRLA | 7871 | GATGCTCAGTCGCGGTTGGCG | 7872 |
| 648 | RESANAD | 7873 | CGTGAGTCTGCGAATGCTGAT | 7874 |
| 649 | LLHGIIA | 7875 | CTTTTACACGGAATAATCGCC | 7876 |
| 650 | GMGASSK | 7877 | GGTATGGGGGCGTCTTCTAAG | 7878 |
| 651 | RNEGINQ | 7879 | CGTAATGAGGGTATTAATCAG | 7880 |
| 652 | PGVAMVT | 7881 | CCCGGGGTCGCTATGGTAACT | 7882 |
| 653 | ASQLTQT | 7883 | GCGTCTCAGCTTACTCAGACT | 7884 |
| 654 | ALGDQAR | 7885 | GCGTTAGGGGACCAAGCGCGT | 7886 |
| 655 | LTDVTQM | 7887 | TTAACCGACGTCACACAAATG | 7888 |
| 656 | DVAISMR | 7889 | GACGTAGCGATATCCATGCGA | 7890 |
| 657 | YGSNVLS | 7891 | TACGGTTCTAACGTCCTCTCA | 7892 |
| 658 | VYHGGVD | 7893 | GTGTATCATGGTGGTGTGGAT | 7894 |
| 659 | SFDTYGA | 7895 | TCCTTCGACACTTACGGGGCC | 7896 |
| 660 | PTTNPLL | 7897 | CCGACTACTAATCCGCTTCTG | 7898 |
| 661 | RVAMSVT | 7899 | AGGGTGGCGATGTCTGTGACG | 7900 |
| 662 | HIVLSHA | 7901 | CATATTGTGCTGAGTCATGCT | 7902 |
| 663 | TLQELQL | 7903 | ACGTTGCAGGAGTTGCAGCTT | 7904 |
| 664 | DPSLGSP | 7905 | GATCCGTCTCTGGGTTCTCCG | 7906 |
| 665 | LAGSVVV | 7907 | CTGGCGGGTTCGGTTGTTGTG | 7908 |
| 666 | ILVDAYA | 7909 | ATACTAGTAGACGCGTACGCT | 7910 |
| 667 | GVANVSP | 7911 | GGAGTTGCTAACGTCAGCCCA | 7912 |
| 668 | RMTLTGD | 7913 | CGTATGACTTTGACTGGTGAT | 7914 |
| 669 | SGGVESK | 7915 | TCTGGTGGTGTTGAGTCGAAG | 7916 |
| 670 | QIHDTAL | 7917 | CAAATCCACGACACAGCGCTC | 7918 |
| 671 | FQVEQIM | 7919 | TTTCAGGTTGAGCAGATTATG | 7920 |
| 672 | GLVQMSS | 7921 | GGTCTGGTGCAGATGTCTTCT | 7922 |
| 673 | FPSMSGK | 7923 | TTCCCAAGCATGTCGGGGAAA | 7924 |
| 674 | VSNGHFV | 7925 | GTTAGTAATGGGCATTTTGTT | 7926 |
| 675 | STVGSSP | 7927 | AGTACGGTGGGGTCGTCGCCG | 7928 |
| 676 | YLVTADN | 7929 | TATTTGGTTACTGCTGATAAT | 7930 |
| 677 | TTRADPA | 7931 | ACTACTCGGGCTGATCCTGCG | 7932 |
| 678 | PLVPQGG | 7933 | CCCTTAGTACCTCAAGGCGGT | 7934 |
| 679 | GARMVMT | 7935 | GGTGCGCGGATGGTTATGACT | 7936 |
| 680 | MKTQIEL | 7937 | ATGAAAACGCAAATAGAACTC | 7938 |
| 681 | VNHGGVD | 7939 | GTAAACCACGGAGGAGTTGAC | 7940 |
| 682 | MVQSGLT | 7941 | ATGGTTCAGTCGGGGTTGACG | 7942 |
| 683 | QYAVSGG | 7943 | CAATACGCAGTGAGCGGCGGT | 7944 |
| 684 | MTSGNLM | 7945 | ATGACCTCTGGCAACCTCATG | 7946 |
| 685 | TTLAHPA | 7947 | ACTACTCTGGCTCATCCTGCG | 7948 |
| 686 | REQQKAW | 7949 | CGAGAACAACAAAAAGCCTGG | 7950 |
| 687 | VTTLSPV | 7951 | GTGACTACGCTTTCTCCTGTG | 7952 |
| 688 | LQDRTTL | 7953 | CTCCAAGACCGCACTACTCTC | 7954 |
| 689 | SLGALVA | 7955 | TCGCTGGGTGCTCTGGTTGCT | 7956 |
| 690 | GADDAAL | 7957 | GGAGCCGACGACGCAGCCCTC | 7958 |
| 691 | IGPRREV | 7959 | ATAGGACCTCGCCGTGAAGTA | 7960 |
| 692 | QSQTAVA | 7961 | CAGTCTCAGACGGCTGTTGCT | 7962 |
| 693 | VDFGDHT | 7963 | GTAGACTTCGGCGACCACACC | 7964 |
| 694 | SLRDTHY | 7965 | AGTCTTCGGGATACTCATTAT | 7966 |
| 695 | YEHSGLL | 7967 | TATGAGCATTCTGGTCTTTTG | 7968 |
| 696 | VTELTRF | 7969 | GTGACTGAGCTTACGCGGTTT | 7970 |
| 697 | LTHLRVS | 7971 | CTGACTCACCTTCGTGTCAGC | 7972 |
| 698 | QRSDSVM | 7973 | CAGCGGTCGGATAGTGTGATG | 7974 |
| 699 | LSKEHAP | 7975 | TTGAGTAAGGAGCATGCTCCT | 7976 |
| 700 | PDGAAPM | 7977 | CCTGATGGTGCGGCTCCTATG | 7978 |
| 701 | LTTPIEL | 7979 | CTAACTACCCCTATAGAACTC | 7980 |
| 702 | AAVVPRY | 7981 | GCAGCAGTAGTACCACGATAC | 7982 |
| 703 | VVLSLAT | 7983 | GTTGTCTTAAGTCTAGCCACT | 7984 |
| 704 | QDAHVAI | 7985 | CAGGATGCGCATGTGGCTATT | 7986 |
| 705 | LGHANGL | 7987 | TTAGGGCACGCAAACGGACTT | 7988 |
| 706 | SPQGVLA | 7989 | TCGCCGCAGGGGGTTCTTGCT | 7990 |
| 707 | LSLTMPA | 7991 | CTCTCGCTTACAATGCCTGCC | 7992 |
| 708 | YVGSPLV | 7993 | TATGTTGGTTCTCCGTTGGTG | 7994 |
| 709 | QILGASS | 7995 | CAAATCTTAGGGGCCTCGAGT | 7996 |
| 710 | NSGSMHT | 7997 | AACTCAGGAAGCATGCACACT | 7998 |
| 711 | GVLGQTD | 7999 | GGTGTGTTGGGGCAGACTGAT | 8000 |
| 712 | MNVGHVL | 8001 | ATGAACGTAGGGCACGTCCTC | 8002 |
| 713 | PNTRDPI | 8003 | CCTAATACGCGGGATCCGATT | 8004 |
| 714 | VEKRHMV | 8005 | GTGGAGAAGAGGCATATGGTG | 8006 |
| 715 | VVSGIPN | 8007 | GTGGTGTCTGGTATTCCGAAT | 8008 |
| 716 | KNGGHDL | 8009 | AAAAACGGTGGGCACGACCTA | 8010 |
| 717 | YESTRGQ | 8011 | TATGAGTCGACGAGGGGTCAG | 8012 |
| 718 | NALGDGY | 8013 | AACGCGCTGGGCGACGGCTAC | 8014 |
| 719 | GLYDAAT | 8015 | GGGCTTTATGATGCGGCGACT | 8016 |
| 720 | LVAGQAM | 8017 | CTGGTGGCGGGGCAGGCTATG | 8018 |
| 721 | DSRTVDS | 8019 | GACTCTCGAACCGTCGACTCA | 8020 |
| 722 | GDRGVVA | 8021 | GGTGATAGGGGGGTTGTGGCT | 8022 |
| 723 | GLESSVP | 8023 | GGCCTTGAAAGCTCTGTACCC | 8024 |
| 724 | LSRGAEN | 8025 | CTTTCGAGGGGTGCGGAGAAT | 8026 |
| 725 | ISMTLLP | 8027 | ATTTCGATGACTCTGCTGCCG | 8028 |
| 726 | AVGNVLL | 8029 | GCTGTGGGGAATGTGCTTTTG | 8030 |
| 727 | QYAVSGG | 8031 | CAGTATGCTGTTAGTGGTGGG | 8032 |
| 728 | PAQGTLR | 8033 | CCTGCTCAGGGGACGCTTCGG | 8034 |
| 729 | DVAVYIR | 8035 | GATGTTGCTGTTTATATTCGT | 8036 |
| 730 | VLQLAAL | 8037 | GTTCTTCAACTCGCTGCCCTC | 8038 |
| 731 | DDAVSKR | 8039 | GATGATGCTGTTTCTAAGCGT | 8040 |
| 732 | LEDRSAS | 8041 | TTGGAGGATCGGTCGGCTAGT | 8042 |
| 733 | PSYQGNG | 8043 | CCGAGTTATCAGGGGAATGGT | 8044 |
| 734 | LGDSDET | 8045 | TTAGGAGACTCGGACGAAACC | 8046 |
| 735 | GNLLLTA | 8047 | GGTAATTTGCTGCTTACTGCT | 8048 |
| 736 | EGVSALL | 8049 | GAGGGTGTTTCTGCGTTGTTG | 8050 |
| 737 | GHQNGGI | 8051 | GGGCACCAAAACGGCGGAATC | 8052 |
| 738 | RSISGDW | 8053 | CGTTCCATAAGTGGCGACTGG | 8054 |
| 739 | YLALTGI | 8055 | TATCTTGCGCTTACGGGGATT | 8056 |
| 740 | LSDGGPL | 8057 | CTCTCGGACGGAGGCCCCCTC | 8058 |
| 741 | LEANVSH | 8059 | CTTGAGGCGAATGTTTCGCAT | 8060 |
| 742 | GLSERAQ | 8061 | GGCCTGTCCGAACGAGCACAA | 8062 |
| 743 | SGFVVPV | 8063 | TCTGGGTTTGTTGTGCCGGTG | 8064 |
| 744 | GVMLLTE | 8065 | GGGGTTATGTTGCTGACTGAG | 8066 |
| 745 | STTSSPS | 8067 | TCGACCACCTCATCCCCTAGC | 8068 |
| 746 | FNGLPAQ | 8069 | TTCAACGGTCTCCCCGCACAA | 8070 |
| 747 | HVSGASL | 8071 | CACGTGTCCGGCGCCAGCTTA | 8072 |
| 748 | GGDTSRS | 8073 | GGGGGTGATACGAGTCGTAGT | 8074 |
| 749 | AVAGTNS | 8075 | GCAGTTGCGGGTACAAACTCG | 8076 |
| 750 | VMSGTSH | 8077 | GTTATGTCGGGTACTAGTCAT | 8078 |
| 751 | YAGIAQG | 8079 | TATGCGGGGATTGCTCAGGGT | 8080 |
| 752 | MLALAVT | 8081 | ATGTTGGCGCTGGCTGTGACG | 8082 |
| 753 | AALTREI | 8083 | GCTGCTCTTACGCGGGAGATT | 8084 |
| 754 | AIVGMLS | 8085 | GCGATTGTGGGTATGCTGTCG | 8086 |
| 755 | MANMLSV | 8087 | ATGGCGAACATGTTATCGGTG | 8088 |
| 756 | LLADERV | 8089 | TTACTCGCAGACGAAAGGGTC | 8090 |
| 757 | LSSTDGV | 8091 | CTGAGTTCGACTGATGGGGTT | 8092 |
| 758 | VTQNLSE | 8093 | GTGACGCAGAATTTGAGTGAG | 8094 |
| 759 | PARYRLW | 8095 | CCGGCGCGGTATCGGCTTTGG | 8096 |
| 760 | GGDALNQ | 8097 | GGGGGGGACGCCCTTAACCAA | 8098 |
| 761 | VMASPGP | 8099 | GTTATGGCTTCGCCTGGTCCT | 8100 |
| 762 | PGDRDQY | 8101 | CCAGGCGACCGAGACCAATAC | 8102 |
| 763 | LGSLVVH | 8103 | CTGGGAAGCTTAGTCGTTCAC | 8104 |
| 764 | LEVGALR | 8105 | CTGGAAGTAGGCGCACTTCGT | 8106 |
| 765 | VSPSVLQ | 8107 | GTTAGTCCTTCGGTGCTTCAG | 8108 |
| 766 | GISGEVS | 8109 | GGTATTTCGGGGGAGGTGAGT | 8110 |
| 767 | RGAEVLL | 8111 | CGGGGTGCGGAGGTGCTGCTG | 8112 |
| 768 | GVAGTNS | 8113 | GGAGTTGCGGGAACAAACTCC | 8114 |
| 769 | LNGGIGV | 8115 | CTTAATGGGGGTATTGGGGTT | 8116 |
| 770 | TIAAHVP | 8117 | ACCATAGCAGCCCACGTACCC | 8118 |
| 771 | LNGISFV | 8119 | TTGAATGGGATTTCGTTTGTG | 8120 |
| 772 | MGVGGGS | 8121 | ATGGGGGTCGGTGGTGGATCC | 8122 |
| 773 | PLKGGGE | 8123 | CCGTTGAAAGGCGGGGGTGAA | 8124 |
| 774 | RVAQALT | 8125 | AGGGTGGCGCAGGCTCTGACG | 8126 |
| 775 | EASSRLL | 8127 | GAAGCTTCGTCGCGACTTCTC | 8128 |
| 776 | SQAEGSV | 8129 | TCCCAAGCGGAAGGCAGCGTG | 8130 |
| 777 | NSGPQLS | 8131 | AACTCGGGCCCACAACTTTCG | 8132 |
| 778 | VQSADPR | 8133 | GTCCAATCCGCGGACCCTCGC | 8134 |
| 779 | VSDSSIN | 8135 | GTGTCGGATTCGTCTATTAAT | 8136 |
| 780 | TVKEYEL | 8137 | ACCGTTAAAGAATACGAACTC | 8138 |
| 781 | MENAPGR | 8139 | ATGGAGAATGCTCCTGGGAGG | 8140 |
| 782 | GNGDMFA | 8141 | GGGAATGGGGATATGTTTGCT | 8142 |
| 783 | HTSGTSS | 8143 | CATACGAGTGGGACGTCGTCG | 8144 |
| 784 | VIASNEP | 8145 | GTTATAGCCTCCAACGAACCG | 8146 |
| 785 | GINEHVA | 8147 | GGGATCAACGAACACGTAGCC | 8148 |
| 786 | HNSHVLT | 8149 | CACAACTCCCACGTATTAACC | 8150 |
| 787 | QANMLTV | 8151 | CAGGCTAATATGTTGACTGTT | 8152 |
| 788 | VFTGTDP | 8153 | GTGTTCACCGGCACAGACCCT | 8154 |
| 789 | ASDAVLR | 8155 | GCATCCGACGCCGTCCTAAGG | 8156 |
| 790 | ASDAVLR | 8157 | GCTAGTGATGCGGTGTTGCGT | 8158 |
| 791 | RDLTNDV | 8159 | CGCGACTTAACTAACGACGTT | 8160 |
| 792 | RVHSAQL | 8161 | AGGGTGCATTCGGCGCAGCTT | 8162 |
| 793 | SGNAWDE | 8163 | AGTGGGAATGCTTGGGATGAG | 8164 |
| 794 | GHQALNA | 8165 | GGCCACCAAGCATTAAACGCC | 8166 |
| 795 | IADMGGN | 8167 | ATTGCTGATATGGGTGGTAAT | 8168 |
| 796 | SMDSTSR | 8169 | TCTATGGATTCGACGTCTAGG | 8170 |
| 797 | GVSLPMS | 8171 | GGCGTATCACTACCCATGAGC | 8172 |
| 798 | AALAGSR | 8173 | GCGGCTCTGGCGGGGTCTAGG | 8174 |
| 799 | ILGVYSD | 8175 | ATACTGGGCGTTTACTCCGAC | 8176 |
| 800 | APRDPGV | 8177 | GCGCCGCGTGATCCTGGTGTT | 8178 |
| 801 | NRHETLS | 8179 | AACCGCCACGAAACACTATCA | 8180 |
| 802 | LGDGTTR | 8181 | CTGGGGGATGGTACGACTCGG | 8182 |
| 803 | RNHDQTH | 8183 | AGAAACCACGACCAAACACAC | 8184 |
| 804 | MTDSGTV | 8185 | ATGACTGATAGTGGGACTGTG | 8186 |
| 805 | NHHGDRL | 8187 | AACCACCACGGAGACAGGCTG | 8188 |
| 806 | LANTVVT | 8189 | CTTGCTAATACGGTTGTGACG | 8190 |
| 807 | QFHENIR | 8191 | CAGTTTCATGAGAATATTCGT | 8192 |
| 808 | NFGRDTL | 8193 | AATTTTGGTCGTGATACTCTG | 8194 |
| 809 | SGSNTGP | 8195 | AGCGGCTCCAACACTGGCCCG | 8196 |
| 810 | EPAMGMR | 8197 | GAGCCGGCGATGGGGATGAGG | 8198 |
| 811 | ENAGTDV | 8199 | GAAAACGCCGGAACTGACGTC | 8200 |
| 812 | IIISSAN | 8201 | ATAATCATATCCTCGGCCAAC | 8202 |
| 813 | NHVGDRL | 8203 | AATCATGTTGGTGATCGTTTG | 8204 |
| 814 | SGGLMTG | 8205 | AGTGGTGGTCTTATGACTGGT | 8206 |
| 815 | GRGTNDH | 8207 | GGTCGGGGTACGAATGATCAT | 8208 |
| 816 | LANMLQV | 8209 | TTGGCAAACATGCTTCAAGTG | 8210 |
| 817 | TNTDSSL | 8211 | ACGAATACGGATTCTAGTCTG | 8212 |
| 818 | GSGPGVA | 8213 | GGTTCTGGGCCGGGGGTGGCT | 8214 |
| 819 | ADVLIRG | 8215 | GCGGACGTGCTCATACGCGGT | 8216 |
| 820 | TLQQLQL | 8217 | ACTCTCCAACAACTGCAATTG | 8218 |
| 821 | TMANSER | 8219 | ACGATGGCAAACTCGGAACGC | 8220 |
| 822 | WDDQTSG | 8221 | TGGGATGATCAGACTTCGGGG | 8222 |
| 823 | GTGSTNV | 8223 | GGAACTGGATCGACAAACGTT | 8224 |
| 824 | GPSGAGI | 8225 | GGGCCATCAGGGGCAGGCATC | 8226 |
| 825 | NAAVIYD | 8227 | AACGCTGCAGTGATATACGAC | 8228 |
| 826 | SNLGETV | 8229 | TCGAATTTGGGGGAGACGGTT | 8230 |
| 827 | EPSLGSR | 8231 | GAGCCGTCTCTGGGTTCTCGG | 8232 |
| 828 | IGASVKL | 8233 | ATCGGTGCATCGGTAAAACTG | 8234 |
| 829 | SRGVISS | 8235 | AGCCGAGGCGTAATCTCGTCA | 8236 |
| 830 | RVMGEEV | 8237 | CGTGTGATGGGGGAGGAGGTT | 8238 |
| 831 | YSTERSV | 8239 | TATTCGACTGAGAGGTCTGTT | 8240 |
| 832 | AGGGTPR | 8241 | GCGGGGGGTGGGACTCCGAGG | 8242 |
| 833 | VLPSPGP | 8243 | GTTCTGCCTTCGCCTGGTCCT | 8244 |
| 834 | TSVLPQT | 8245 | ACGTCTGTGCTTCCTCAGACT | 8246 |
| 835 | ILASPGP | 8247 | ATACTTGCGTCACCCGGACCG | 8248 |
| 836 | GEIDIAF | 8249 | GGAGAAATCGACATAGCCTTC | 8250 |
| 837 | GWADSVP | 8251 | GGTTGGGCTGATTCGGTTCCG | 8252 |
| 838 | GVAATNT | 8253 | GGAGTTGCAGCCACAAACACG | 8254 |
| 839 | LVGNPST | 8255 | CTCGTGGGCAACCCGAGTACG | 8256 |
| 840 | YGVTLST | 8257 | TACGGCGTAACCCTCTCTACC | 8258 |
| 841 | ASMGTVA | 8259 | GCGTCCATGGGAACCGTAGCC | 8260 |
| 842 | WSNSEQH | 8261 | TGGTCGAATTCGGAGCAGCAT | 8262 |
| 843 | REVSPLM | 8263 | CGAGAAGTAAGCCCCCTGATG | 8264 |
| 844 | QAESAAR | 8265 | CAAGCGGAATCAGCGGCTAGA | 8266 |
| 845 | ALQSAQV | 8267 | GCACTACAATCTGCACAAGTT | 8268 |
| 846 | PNDRLTV | 8269 | CCAAACGACCGGTTGACGGTT | 8270 |
| 847 | LIVTENQ | 8271 | TTGATTGTGACGGAGAATCAG | 8272 |
| 848 | GLVHMPS | 8273 | GGCTTAGTTCACATGCCCTCA | 8274 |
| 849 | MADGASM | 8275 | ATGGCGGATGGTGCGTCTATG | 8276 |
| 850 | RAVENMG | 8277 | CGCGCAGTAGAAAACATGGGC | 8278 |
| 851 | LNGVTIT | 8279 | CTCAACGGCGTCACCATCACC | 8280 |
| 852 | RYNVETA | 8281 | CGGTATAATGTTGAGACTGCG | 8282 |
| 853 | SLLHDGA | 8283 | AGTTTGTTGCATGATGGGGCG | 8284 |
| 854 | TRIGLSD | 8285 | ACACGAATAGGACTCAGTGAC | 8286 |
| 855 | NAHALMV | 8287 | AACGCCCACGCACTCATGGTC | 8288 |
| 856 | VEVQAGK | 8289 | GTGGAGGTTCAGGCTGGGAAG | 8290 |
| 857 | RGGVLSE | 8291 | CGAGGTGGGGTACTCAGTGAA | 8292 |
| 858 | KNQDTKM | 8293 | AAGAATCAGGATACGAAGATG | 8294 |
| 859 | QLRPLQT | 8295 | CAACTGCGTCCTTTGCAAACG | 8296 |
| 860 | LLENARV | 8297 | CTGCTGGAGAATGCGAGGGTG | 8298 |
| 861 | LFGPSAY | 8299 | TTATTCGGACCTTCCGCCTAC | 8300 |
| 862 | RIDAELL | 8301 | CGTATTGATGCTGAGTTGTTG | 8302 |
| 863 | VVSGLLH | 8303 | GTTGTCTCCGGGTTGCTACAC | 8304 |
| 864 | MGGVTSV | 8305 | ATGGGGGGGGTTACTTCGGTG | 8306 |
| 865 | TVADPRA | 8307 | ACTGTTGCGGATCCGCGGGCG | 8308 |
| 866 | TGLQVST | 8309 | ACTGGGCTGCAGGTTAGTACT | 8310 |
| 867 | ANEHNIA | 8311 | GCTAATGAGCATAATATTGCG | 8312 |
| 868 | STLASPR | 8313 | TCAACCCTAGCCTCGCCTCGA | 8314 |
| 869 | IHFSGDN | 8315 | ATCCACTTCAGCGGCGACAAC | 8316 |
| 870 | GLVQIVA | 8317 | GGGCTTGTTCAGATTGTTGCG | 8318 |
| 871 | TAYDTLV | 8319 | ACGGCGTATGATACGTTGGTT | 8320 |
| 872 | AVKEYQS | 8321 | GCTGTTAAAGAATACCAATCT | 8322 |
| 873 | ASSHVTV | 8323 | GCTTCGAGTCATGTTACTGTG | 8324 |
| 874 | STLSTFD | 8325 | TCGACTTTGAGTACGTTTGAT | 8326 |
| 875 | LDLTSDV | 8327 | CTTGATCTGACGTCTGATGTG | 8328 |
| 876 | QYNVEST | 8329 | CAGTATAATGTTGAGTCTACG | 8330 |
| 877 | SVEPLSL | 8331 | TCCGTAGAACCTCTATCCCTC | 8332 |
| 878 | PGHGPVR | 8333 | CCCGGGCACGGACCTGTACGC | 8334 |
| 879 | VRQLDSR | 8335 | GTGAGGCAGCTGGATTCGCGG | 8336 |
| 880 | MMLNQGS | 8337 | ATGATGCTTAACCAAGGCAGC | 8338 |
| 881 | EPSLSSP | 8339 | GAGCCGTCTCTGAGTTCTCCG | 8340 |
| 882 | PGVDTGV | 8341 | CCTGGTGTTGATACTGGTGTT | 8342 |
| 883 | SGDVARH | 8343 | TCAGGCGACGTTGCCCGACAC | 8344 |
| 884 | ADYGTSS | 8345 | GCGGACTACGGTACCAGCTCT | 8346 |
| 885 | VHSQDVS | 8347 | GTGCATTCGCAGGATGTGTCT | 8348 |
| 886 | VIAGLGV | 8349 | GTGATCGCGGGACTCGGCGTC | 8350 |
| 887 | VHVDNSN | 8351 | GTGCATGTTGATAATAGTAAT | 8352 |
| 888 | QSGVF*C | 8353 | CAGTCGGGGGTGTTCTGATGC | 8354 |
| 889 | AQDHGTL | 8355 | GCGCAGGATCATGGGACGTTG | 8356 |
| 890 | SRLEYIG | 8357 | AGCCGCCTTGAATACATCGGG | 8358 |
| 891 | VLLGINT | 8359 | GTCCTGCTCGGAATAAACACC | 8360 |
| 892 | LGIGQGP | 8361 | TTGGGTATTGGTCAGGGTCCT | 8362 |
| 893 | NVTATLG | 8363 | AACGTCACAGCAACGCTGGGT | 8364 |
| 894 | EVLSLAP | 8365 | GAGGTGCTGTCTCTTGCTCCG | 8366 |
| 895 | TNGVLYT | 8367 | ACAAACGGCGTCCTTTACACG | 8368 |
| 896 | RFVGSVP | 8369 | AGGTTTGTGGGTAGTGTTCCG | 8370 |
| 897 | TNGYRED | 8371 | ACTAATGGTTATAGGGAGGAT | 8372 |
| 898 | LESAAMI | 8373 | CTGGAGTCGGCTGCTATGATT | 8374 |
| 899 | VPLPSGK | 8375 | GTTCCTCTGCCGAGTGGGAAG | 8376 |
| 900 | NSKDVQR | 8377 | AACTCCAAAGACGTACAAAGA | 8378 |
| 901 | GVGGTYS | 8379 | GGAGTTGGGGGCACATACAGT | 8380 |
| 902 | LTDKMTS | 8381 | TTGACTGATAAGATGACGTCG | 8382 |
| 903 | SGAAAAT | 8383 | AGCGGGGCCGCAGCCGCCACC | 8384 |
| 904 | MVTTTNT | 8385 | ATGGTGACGACCACAAACACC | 8386 |
| 905 | TSLGLMQ | 8387 | ACTAGCCTTGGCTTAATGCAA | 8388 |
| 906 | LVHLGTS | 8389 | TTGGTTCATCTTGGGACTTCT | 8390 |
| 907 | NGMGDVT | 8391 | AATGGGATGGGTGATGTGACG | 8392 |
| 908 | LNSPLHV | 8393 | CTGAATAGTCCGCTGCATGTT | 8394 |
| 909 | GSRESVR | 8395 | GGGAGTAGGGAGAGTGTGCGT | 8396 |
| 910 | DNSPMDL | 8397 | GACAACAGCCCCATGGACCTA | 8398 |
| 911 | VVSPQPV | 8399 | GTGGTTTCGCCTCAACCGGTG | 8400 |
| 912 | STINTLM | 8401 | AGTACTATTAATACTCTGATG | 8402 |
| 913 | THGDAGG | 8403 | ACTCATGGGGATGCTGGTGGG | 8404 |
| 914 | AVLAGSS | 8405 | GCGGTTCTGGCGGGGTCTAGT | 8406 |
| 915 | YTSGTGT | 8407 | TACACCTCGGGCACAGGGACA | 8408 |
| 916 | GPDTGAM | 8409 | GGCCCCGACACAGGCGCGATG | 8410 |
| 917 | SGMQAEA | 8411 | TCGGGTATGCAGGCGGAGGCT | 8412 |
| 918 | LATHDAR | 8413 | CTCGCAACGCACGACGCACGA | 8414 |
| 919 | YDRIMSS | 8415 | TACGACCGCATAATGTCATCT | 8416 |
| 920 | RHHGTES | 8417 | CGTCATCATGGTACTGAGAGT | 8418 |
| 921 | MAVKSPP | 8419 | ATGGCTGTGAAGTCGCCGCCG | 8420 |
| 922 | EVRDTKT | 8421 | GAAGTTCGGGACACAAAAACG | 8422 |
| 923 | GFVQSRM | 8423 | GGGTTTGTTCAGAGTCGGATG | 8424 |
| 924 | VLAAVDR | 8425 | GTCCTTGCTGCCGTCGACCGA | 8426 |
| 925 | VTTVPPV | 8427 | GTGACTACGGTTCCTCCTGTG | 8428 |
| 926 | HFSSETS | 8429 | CACTTCTCTTCCGAAACTTCT | 8430 |
| 927 | TTVTVSL | 8431 | ACGACGGTGACGGTGTCGTTG | 8432 |
| 928 | AESRLFV | 8433 | GCGGAGAGTAGGCTGTTTGTG | 8434 |
| 929 | LSGGFTA | 8435 | TTGAGTGGTGGTTTTACGGCG | 8436 |
| 930 | NSDLASP | 8437 | AATAGTGATTTGGCGTCTCCT | 8438 |
| 931 | LDHGASA | 8439 | TTAGACCACGGAGCGTCGGCG | 8440 |
| 932 | YGSNDLS | 8441 | TATGGGAGTAATGATCTGAGT | 8442 |
| 933 | VIASNEH | 8443 | GTCATAGCCTCAAACGAACAC | 8444 |
| 934 | LTGSIGL | 8445 | TTAACTGGGTCAATTGGACTC | 8446 |
| 935 | HLSRDHS | 8447 | CACCTGTCACGTGACCACTCA | 8448 |
| 936 | NLRGEHT | 8449 | AATTTGCGTGGGGAGCATACG | 8450 |
| 937 | ILVDALA | 8451 | ATTCTGGTTGATGCTCTTGCG | 8452 |
| 938 | SGYDTSV | 8453 | AGTGGGTATGATACGTCGGTT | 8454 |
| 939 | HKDKWVG | 8455 | CACAAAGACAAATGGGTTGGG | 8456 |
| 940 | MTGNSFV | 8457 | ATGACAGGCAACAGCTTCGTA | 8458 |
| 941 | YTVGSLA | 8459 | TACACCGTTGGCTCACTCGCC | 8460 |
| 942 | SVSKPFL | 8461 | AGTGTGAGTAAGCCTTTTTTG | 8462 |
| 943 | TVMTSEP | 8463 | ACAGTTATGACCAGCGAACCT | 8464 |
| 944 | SMGYVSA | 8465 | TCGATGGGTTATGTTTCGGCT | 8466 |
| 945 | ILVDAYA | 8467 | ATTCTGGTTGATGCTTATGCG | 8468 |
| 946 | QGGTTLR | 8469 | CAAGGGGGGACTACTCTACGC | 8470 |
| 947 | SEGLSRD | 8471 | TCGGAGGGTCTTTCGCGTGAT | 8472 |
| 948 | FTGGTGT | 8473 | TTTACTGGTGGTACGGGTACT | 8474 |
| 949 | RSGSGVA | 8475 | CGGTCGGGCTCCGGAGTCGCC | 8476 |
| 950 | VLASLGP | 8477 | GTGCTCGCCAGTCTCGGCCCC | 8478 |
| 951 | LVTGMSS | 8479 | CTTGTCACGGGCATGTCAAGC | 8480 |
| 952 | ALASTQT | 8481 | GCACTAGCATCGACCCAAACT | 8482 |
| 953 | SLVRGLL | 8483 | AGTCTTGTTCGGGGTTTGCTG | 8484 |
| 954 | VGQVPGR | 8485 | GTGGGGCAAGTCCCGGGTAGG | 8486 |
| 955 | NGPMKAD | 8487 | AACGGTCCAATGAAAGCAGAC | 8488 |
| 956 | GPMASVV | 8489 | GGGCCGATGGCGTCTGTGGTT | 8490 |
| 957 | LVSGLGP | 8491 | CTTGTGAGTGGGCTGGGTCCG | 8492 |
| 958 | AADRSVR | 8493 | GCAGCAGACCGCTCCGTACGT | 8494 |
| 959 | AATSGGP | 8495 | GCAGCCACCAGTGGCGGGCCG | 8496 |
| 960 | RDLTSNV | 8497 | CGAGACTTAACTAGCAACGTA | 8498 |
| 961 | IVMSSHI | 8499 | ATCGTCATGAGCTCCCACATC | 8500 |
| 962 | GPLNQSL | 8501 | GGTCCGCTGAATCAGTCTTTG | 8502 |
| 963 | TDGRTLH | 8503 | ACGGATGGTAGGACGCTGCAT | 8504 |
| 964 | TGLQVSF | 8505 | ACTGGGCTGCAGGTTAGTTTT | 8506 |
| 965 | RVTTHTP | 8507 | CGTGTTACTACTCATACGCCG | 8508 |
| 966 | EVGSIGS | 8509 | GAGGTTGGTAGTATTGGTTCT | 8510 |
| 967 | TDVHSTS | 8511 | ACGGATGTGCATTCGACTTCG | 8512 |
| 968 | TFAISDR | 8513 | ACTTTTGCGATTTCTGATCGG | 8514 |
| 969 | TVLAAAH | 8515 | ACGGTGTTGGCTGCGGCTCAT | 8516 |
| 970 | MNDAGRD | 8517 | ATGAATGATGCTGGGCGTGAT | 8518 |
| 971 | PAEHYQA | 8519 | CCGGCTGAGCATTATCAGGCT | 8520 |
| 972 | DRSTAEW | 8521 | GACCGCTCCACAGCAGAATGG | 8522 |
| 973 | LYGGSSA | 8523 | CTCTACGGAGGGTCCTCGGCT | 8524 |
| 974 | VTQAVYV | 8525 | GTTACGCAGGCTGTTTATGTT | 8526 |
| 975 | GVNHAVA | 8527 | GGAGTCAACCACGCCGTCGCC | 8528 |
| 976 | DSAPAAR | 8529 | GATTCGGCTCCGGCGGCTCGG | 8530 |
| 977 | DPKTGWR | 8531 | GATCCGAAGACTGGGTGGCGT | 8532 |
| 978 | SIVGSVQ | 8533 | TCAATCGTAGGCTCAGTCCAA | 8534 |
| 979 | DSDSGRR | 8535 | GATTCTGATAGTGGGCGGCGG | 8536 |
| 980 | EQYLGSP | 8537 | GAGCAGTATCTGGGTTCTCCG | 8538 |
| 981 | LSLDRPS | 8539 | CTAAGTCTAGACCGACCCTCG | 8540 |
| 982 | MGDIVTL | 8541 | ATGGGGGATATTGTTACGCTT | 8542 |
| 983 | SFRDTVP | 8543 | AGTTTTAGGGATACGGTGCCT | 8544 |
| 984 | RGLSDPV | 8545 | CGGGGGCTGTCTGATCCGGTG | 8546 |
| 985 | TGGLLYS | 8547 | ACTGGTGGGCTTCTTTATAGT | 8548 |
| 986 | VVLSGIS | 8549 | GTGGTTTTGTCGGGGATTTCT | 8550 |
| 987 | GVAGTYL | 8551 | GGGGTGGCTGGGACGTATCTG | 8552 |
| 988 | LNGSHGP | 8553 | CTGAATGGGTCGCATGGGCCG | 8554 |
| 989 | PSGALMT | 8555 | CCTTCAGGCGCCTTGATGACG | 8556 |
| 990 | LSLTDGV | 8557 | TTGTCCTTAACCGACGGAGTG | 8558 |
| 991 | GRDLTPA | 8559 | GGGCGTGACCTGACTCCAGCG | 8560 |
| 992 | AGHSNAV | 8561 | GCTGGGCATTCTAATGCGGTT | 8562 |
| 993 | GVAGTDS | 8563 | GGGGTGGCTGGGACGGATTCT | 8564 |
| 994 | AELGIRY | 8565 | GCTGAGCTGGGGATTAGGTAT | 8566 |
| 995 | PLSNAAL | 8567 | CCTCTATCTAACGCAGCACTG | 8568 |
| 996 | IGLSVST | 8569 | ATTGGGCTGTCTGTTTCTACT | 8570 |
| 997 | RSITIGP | 8571 | CGTTCGATTACTATTGGGCCG | 8572 |
| 998 | GLVRIQD | 8573 | GGACTGGTTCGGATCCAAGAC | 8574 |
| 999 | LSGIMVS | 8575 | TTGTCGGGGATTATGGTTTCG | 8576 |
| 1000 | SWQSDTD | 8577 | TCGTGGCAGTCTGATACGGAT | 8578 |

[0554] Table 9. PAL2 and AAV9 transgene expression and vector genome abundance in one cynomolgus macaque. ^{a}Transgene mRNA expression normalized to expression of GAPDH mRNA as detected by qPCR with a standard curve ^{b}Vector DNA normalized to the number of GAPDH genomic DNA copies as detected by qPCR with a standard curve

TABLE 9

| | PAL2 | AAV9 | PAL2/AV9 | PAL2 vector | AAV9 vector | PAL2/AAV9 |
|---|---|---|---|---|---|---|
| Tissue | mRNA* | mRNA* | mRNA | genomes/cell^{b} | genomes/cell^{b} | vector DNA |
| Frontal lobe | 3.81E−05 | 7.82E−06 | 4.87 | 6.25E−3 | 4.86E−03 | 1.29 |
| Temporal lobe | 4.8E−05 | 1.10E−05 | 4.37 | 1.13E−02 | 1.09E−02 | 1.04 |
| (anterior) | | | | | | |
| Temporal lobe | 6.27E−05 | 1.17E−05 | 5.35 | 1.01E−02 | 8.07E−03 | 1.25 |
| (posterior) | | | | | | |
| Parietal lobe | 7.98E−05 | 1.35E−05 | 5.93 | 1.10E−02 | 9.11E−03 | .21 |
| (anterior) | | | | | | |
| Parietal lobe | 1.19E−04 | 2.28E−05 | 5.23 | 1.37E−02 | 1.13E−02 | 1.22 |
| (posterior) | | | | | | |
| Occipital lobe | 1.06E−04 | 1.93E−05 | 5.50 | 6.73E−03 | 4.83E−03 | 1.39 |
| Thalamus | 5.54E−05 | 1.20E−05 | 4.61 | 2.04E−02 | 7.96E−03 | 2.56 |
| Midbrain | 9.67E−05 | 1.97E−05 | 4.90 | 9.28E−03 | 5.01E−03 | 1.85 |
| Corpus | 8.27E−05 | 3.03E−05 | 2.73 | 3.67E−03 | 1.93E−03 | 1.91 |
| callosum | | | | | | |
| Cerebellum | 6.69E−05 | 3.16E−05 | 2.11 | 2.18E−03 | 1.44E−03 | 1.51 |
| Neuroretina | 1.63E−04 | 1.22E−05 | 13.40 | 3.19E−03 | 8.52E−04 | 3.75 |
| RPE | 4.01E−04 | 1.72E−04 | 2.34 | 1.12E−01 | 1.85E−01 | 0.61 |
| Brain Stem | 9.34E−05 | 4.00E−05 | 2.33 | 8.97E−03 | 5.76E−03 | 1.56 |
| Cervical | 4.34E−04 | 1.44E−04 | 3.01 | 2.08E−02 | 1.42E−02 | 1.46 |
| spinal cord | | | | | | |
| Thoracic | 9.41E−04 | 3.19E−04 | 2.94 | 2.38E−02 | 1.84E−02 | 1.29 |
| spinal cord | | | | | | |
| Lumbar spinal | 1.71E−03 | 4.78E−04 | 3.58 | 3.15E−02 | 1.74E−02 | 1.80 |
| cord | | | | | | |
| Cauda equina | 3.90E−02 | 6.81E−03 | 5.74 | 6.35E−02 | 3.42E−02 | 1.86 |
| Cervical DRG | 3.12E−02 | 3.23E−03 | 9.64 | 5.08E−02 | 3.32E−02 | 1.53 |
| Thoracic DRG | 1.55E−02 | 1.97E−03 | 7.83 | 3.57E−02 | 1.93E−02 | 1.84 |
| Lumbar DRG | 3.98E−02 | 6.07E−03 | 6.56 | 1.74E−01 | 1.37E−01 | 1.27 |
| Triceps | 5.08E−02 | 1.72E−02 | 2.95 | 2.03E−01 | 2.49E−01 | 0.82 |
| Quadriceps | 5.37E−03 | 1.46E−03 | 3.68 | 2.70E−02 | 4.36E−02 | 0.62 |
| Diaphragm | 2.79E−02 | 8.01E−03 | 3.48 | 1.55E−01 | 1.97E−01 | 0.79 |
| Heart | 2.76E−02 | 1.15E−02 | 2.39 | 1.37E−01 | 2.04E−01 | 0.67 |
| Kidney | 4.81E−04 | 1.71E−04 | 2.81 | 1.53E−01 | 1.73E−01 | 0.88 |
| Lung | 8.12E−04 | 3.95E−04 | 2.06 | 3.44E−01 | 4.10E−01 | 0.84 |
| Thymus | 3.38E−03 | 1.85E−03 | 1.83 | 1.44E−02 | 4.69E−03 | 3.06 |
| Gonad | 3.20E−03 | 2.89E−03 | 1.11 | 1.83E−02 | 2.25E−02 | 0.81 |
| Liver | 8.35E−02 | 1.73E−01 | 0.48 | 1.31E+−01 | 5.02E+01 | 0.26 |
| Spleen | 1.84E−04 | 3.78E−04 | 0.49 | 6.29E+00 | 1.27E+00 | 4.97 |

### Benchmarking Engineered AAV Capsids in Mice and Macaques.

[0555] Applicant assessed the relative performance of mouse- and macaque-derived engineered variants in order to determine if any variants had strong neurotropic properties in both mice and macaques. Applicant performed a benchmarking experiment in C57BL/6J and BALB/cJ mice as well as in cynomolgus macaques comparing four mouse-derived variants and eight macaque-derived variants from this study with AAV9. This panel also included three promising engineered variants developed by the Gradinaru lab using the M-CREATE platform: PHP.C2, which is known to transduce the CNS of both C57BL/6J and BALB/cJ mice,²³ and AAV.CAP-B 10 and AAV.CAP-B22, two PHP.eB-derived variants that were initially selected in Cre-transgenic mice but have demonstrated enhanced neurotropic activity in marmosets” (FIG. 17A). Applicant generated rAAVs with each of these 16 capsids packaging a human frataxin (hFN) transgene—the gene involved in the degenerative neurological disorder Freidreich's ataxia—under control of the constitutive CBh promoter. The transgene of rAAVs produced with each capsid contained a unique set of fifty 20-mer barcodes in the 3′UTR region, which allowed us to associate sequenced hFXN transcripts with a specific capsid variant (FIG. 17B). We administered a pool containing equal proportions of each of these 16 capsid variants by intravenous (IV) injection to C57BL/6J and BALB/cJ mice and cynomolgus macaques at a total combined dose of 3E+13 vg/kg.

[0556] Applicant found that the efficacy of each variant tested was linked to the animal model in which it was initially identified and no variant exhibited cross-species CNS-tropic behavior. Quantification of hFXN mRNA expression revealed that none of the eight variants selected in macaques were capable of enhanced transduction of the brain or spinal cord of either mouse strain (FIG. 17C-17D). Likewise, none of the seven mouse-derived variants that we tested effectively transduced the macaque CNS (FIG. 4E). Remarkably, the AAV.CAP-B10 and AAV.CAP-B22 variants, which have previously been shown to outperform AAV9 in transducing the marmoset brain following systemic administration,²⁵ did not show increased performance in any area of the macaque CNS (FIGS. 4E and 20A).

[0557] Applicant were able to verify the efficacy of mouse-derived variants in the mouse strain in which each was initially discovered. All four mouse-derived variants identified in this study significantly outperformed AAV9 in transducing the brain and spinal cord of both mouse strains by a considerable margin, although of these four variants, only M.Mus.1 and M.Mus.2 were detargeted from the liver (FIG. 17C-17D). The AAV.CAP-B10, AAV.CAP-B22, and PHP.C2 variants performed exceptionally well in the C57BL/6J brain and spinal cord (FIG. 17C). PHP.C2 was also able to successfully transduce the BALB/cJ brain and spinal cord in line with previous findings²³ (FIG. 17D). However, as with the PHP.eB variant from which they were derived,^{27,28} the CNS tropism of AAV.CAP-B10 and AAV.CAP-B22 did not extend to BALB/cJ mice (FIG. 17D).

[0558] Applicant found that a number of variants discovered during the macaque selections in this study had increased potency over AAV9 in the macaque CNS. Three PAL family variants, PAL1A-PAL1C, were significantly better at transducing all four lobes of the macaque brain as well as the thalamus, midbrain, and corpus callosum, but not the cerebellum, brain stem, or spinal cord (FIGS. 17E and 20A). These three variants were additionally significantly detargeted from the dorsal root ganglia (DRG) (FIG. 17E). M.Fas.1-3 did not demonstrate significantly increased potency in the cerebrum, but unlike the PAL variants, they effectively transduced the spinal cord (FIG. 17E). All macaque-derived variants except for M.Fas.3 were significantly detargeted from the macaque liver compared to AAV9 as measured by both transgene mRNA expression and vector genome delivery (FIGS. 17E and 20B).

### Individual Characterization of a PAL Variant in One Cynomolgous Macaque.

[0559] Applicant attempted to further optimize the PAL motif by performing a second-generation selection in cynomolgus macaques with the PAL motif fixed, varying only the second and sixth position of the 7-mer insert as well as the three flanking residues immediately upstream of the insert. Modifications to this upstream flanking region, corresponding to SAQ in wild-type AAV9, have previously resulted in the enhanced transduction of PHP.eB compared to PHP.B.²² From this selection Applicant chose the second-generation PAL variant PAL2, with the sequence EVGPTQGTVR (SEQ ID NO: 332), for further study due to its relatively high performance and its similarity with the top first-generation variant PAL1A. Applicant produced rAAVs with AAV9 and PAL2 each encoding hFXN under control of the CBh promoter and systemically administered 3E+13 vg/kg of each virus, for a total dose of 6E+13 vg/kg, to one female cynomolgus macaque. In order to distinguish between genomes and transcripts from the two different capsids, Applicant tagged the hFXN transgene with an HA or FLAG epitope tag in PAL2 and AAV9 capsids, respectively.

[0560] Applicant assessed both vector transgene delivery and expression throughout a variety of tissues and found that PAL2 facilitated between a fourfold and sixfold increase in transgene mRNA expression throughout the cerebrum compared to AAV9, except in the corpus callosum, where we only observed a 2.7-fold improvement (FIG. 18A and Table 8). As seen with the first-generation PAL1 variants, PAL2 transduction lagged in the cerebellum compared to the cerebrum, and in this experiment, we found only a 2.1-fold increase in mRNA expression from PAL2 in the cerebellum (FIG. 18A). Improvements in vector genome delivery were more modest; throughout the cerebrum and cerebellum we observed less than twofold more PAL2 vector genomes compared to AAV9 (FIG. 18A and Table 8). In line with our observations of first-generation PAL1 variants, PAL2 demonstrated one quarter of the vector genome abundance and one half of the mRNA expression in the liver relative to AAV9 (FIG. 18A and Table 8).

[0561] To further characterize transgene expression from PAL2, we performed immunostaining for the HA-tagged hFXN transgene. Applicant found that PAL2 transduction was broadly distributed throughout the cerebrum, and cells expressing HA-hFXN were found in diverse regions (FIG. 18B). Though AAV9 transduction in the brain is thought to be mostly limited to astrocytes rather than neurons,¹⁴⁻³³ PAL2 demonstrated distinct neurotropic behavior: HA-hFXN expression was frequently observed in NeuN+ neurons in both the cortex and hippocampus (FIG. 18C-18D). Though PAL2 also outperformed AAV9 in transgene delivery and expression in the spinal cord (FIG. 18A and Table 8), transduction in the spinal cord was more limited to non-neuronal cell types (FIG. 18E).

[0562] As rAAVs have been successfully employed in the treatment of ocular diseases,³⁴ Applicant also assessed the relative efficiency of PAL2 in the retinal pigment epithelium (RPE) and neuroretina (retina absent the RPE). Applicant found that PAL2 outperformed AAV9 in both transgene delivery and expression in the neuroretina by a factor of 3.8 and 13.4, respectively (FIG. 18A and Table 8). PAL2 vector genome abundance in the RPE was only 0.6-fold that of AAV9, but PAL2 nonetheless facilitated 2.3-fold greater mRNA expression in the RPE. Expression of the HA-hFXN transgene in the neuroretina was largely limited to photoreceptor cells, with expression particularly concentrated in the outer plexiform layer where bipolar and horizontal cells synapse with photoreceptors (FIG. 18F).

[0563] Though three first-generation PAL1 variants were significantly detargeted from the DRG, we found that PAL2 had increased DRG tropism compared to AAV9 (FIG. 18A and Table 8). Transduction of the DRG has been associated with neuroinflammation and neurodegeneration that can result in ataxia and other PNS deficits.^{17,20,35-37} Applicant therefore assessed the spinal cord and DRG for abnormal pathology. As the macaque was administered a pool containing both AAV9 and PAL2, Applicant are unable to distinguish the effects of one capsid from another; however, Applicant was able to assess the combined effect of the two vectors in the context of this experiment. Multiple DRG and spinal cord sections from the cervical, thoracic, and lumbar regions of the spine were analyzed by a neuropathologist who established severity scores ranging from 0 (within normal limits) to 5 as previously described.^{36,38} The macaque did not show abnormal pathology in any region tested (FIG. 18G).

### Discussion

[0564] In this example, Applicant used the previously described DELIVER method³⁰ to identify the novel PAL family of capsids that offer enhanced transduction in the CNS of cynomolgus macaques after a single dose IV infusion (FIGS. 17A-17E and 18A-18H). This is the first example of engineered AAVs evolved de novo in macaques demonstrating increased CNS tropism in macaques following systemic administration. Applicant identified this family of capsids after just two rounds of selection in macaques, illustrating the utility of DELIVER in identifying potent AAV capsid variants in an additional tissue type. In a pooled characterization experiment assessing the performance of multiple engineered rAAVs in macaques, three PAL capsid variants (PAL1A-C) were capable of a moderate but statistically significant two- to threefold increase in transgene expression throughout the cerebrum (FIGS. 17A-17E and 20A-20B). The second-generation variant PAL2 displayed an even greater four to six-fold improvement in transgene expression in most areas of the cerebrum in one macaque. PAL2 was notably 13-fold more potent than AAV9 at transducing the neuroretina of one macaque (FIG. 18A-18H), suggesting the feasibility of using a systemically administered rAAV to treat a disease affecting both the brain and retina, such as Krabbe disease. Additional studies with a greater number of animal subjects will be required to fully assess the performance of this variant.

[0565] In addition to demonstrating increased CNS tropism in macaques, the PAL variants displayed a striking decrease in liver tropism both in terms of vector genome delivery and transgene mRNA expression (FIGS. 17E, 20B, and 18A, and Table 8). Identification of vectors with reduced liver tropism is key to harnessing the advantages conferred by systemic administration, as sequestration of viral particles in the liver following IV infusion both decreases the effective dose at the target tissue and can lead to severe liver toxicity.^{1,2,15,17-20} These results therefore suggest that PAL vectors could achieve therapeutic efficacy following systemic administration at a reduced dose and with a lower risk of liver toxicity.

[0566] Though the PAL variants are capable of enhanced transduction of the macaque CNS, we found that engineered variants identified in mice were universally unsuccessful. Variants such as MDV1A that were selected in mice via DELIVER were able to potently transduce the CNS of two mouse strains (FIG. 15A-15H), but none of the four mouse-selected variants identified in this study outperformed AAV9 in transducing any area of the macaque CNS (FIG. 17A-17E). Even more surprisingly, AAV.CAP-B10 and AAV.CAP-B22, two variants that were selected in mice and shown to have enhanced neurotropic properties in marmosets,^{23,25} also failed to outperform AAV9 in transducing the CNS of cynomolgus macaques, a primate more closely related to humans. The failure of AAV transduction profiles to translate from mice to primates is well documented and has hampered development of CNS-targeted rAAV therapies,^{26,29} but this finding that the performance of some variants in one primate species may not translate even to another primate species has worrying implications for the field. Though variants that retain their overall transduction behavior across a variety of model organism species are powerful tools from a preclinical standpoint and have been found for the skeletal muscle,³⁰ the complexity of the CNS appears to pose additional challenges. It is therefore can be important that engineered AAVs are selected and evaluated in an appropriate animal model—one with the highest possible degree of similarity to humans—in order to maximize the likelihood of therapeutic efficacy in treating human neurological disorders.

[0567] The properties of the PAL variants and other variants identified in this study may be further enhanced in a number of ways. Firstly, additional iterations of directed evolution focusing on the 7-mer insert motif, flanking amino acids, or other areas of the capsid may result in improved or otherwise altered transduction properties as has been observed in the development of PHP.eB, AAV.CAP-B10, and AAV.CAP-B22.^{22,25} Secondly, though the advantages of systemic administration motivating this study are clear, refinement of intra-CSF delivery routes remains a promising area of research and may result in more robust transgene expression in the CNS³³ at the possible expense of a higher risk of neuroinflammation and neurodegeneration.^{35-37,39} The combination of a PAL variant with an intra-CSF delivery method such as intrathecal or intracisternal injection may prove fruitful and suggest more varied applications for these variants. Finally, the inclusion of tissue-specific microRNA targets on the vector transgene can reduce transgene expression and associated side effects in off-target tissues. Similar strategies utilizing microRNAs have shown promising results in vivo in the context of both liver and DRG detargeting.^{38,40-43}

[0568] In summary, this Example identifies of a variety of AAV capsid variants with neurotropic properties in either mice or cynomolgus macaques, including a more extensively characterized family of variants containing a PAL motif that are capable of enhanced transduction of the macaque CNS and reduced sequestration in the liver following a single IV infusion. These results suggest that rAAV-based therapies with PAL variants may achieve therapeutic efficacy at a reduced dose, minimizing both safety concerns and vector manufacturing challenges. Applicant additionally provides a list of the 1000 most highly enriched capsid variants in the CNS of macaques and two mouse strains (Table 8); further investigation and characterization of these variants may identify additional candidates for CNS gene therapy. Though Applicant was unable to identify any variants able to potently transduce both the mouse and macaque CNS, this finding indicates a critical need for appropriate animal models and a move away from the current paradigm of evolving CNS-tropic AAVs in mice. This Example, particularly the characterization of the PAL family of variants in macaques, represents a significant advancement towards safe and effective rAAV therapies for diseases of the CNS in humans.

### Methods

### Animals

[0569] All animal care, housing, and experimental procedures were carried out in accordance with the Broad Institute Institutional Animal Care and Use Committee (IACUC) and Biomere's IACUC.

### Mice

[0570] Eight week old male and female C57BL/6J (JAX, #000664) and BALB/cJ (JAX, #000651) mice were purchased from the Jackson laboratory. All mouse AAV injections were performed retro-orbitally. Tissue samples were collected from the mice two weeks post-injection after whole body perfusion with either Dulbecco's phosphate-buffered saline (DPBS) (Gibco, #14190144) or DPBS followed by 4% paraformaldehyde (PFA).

### Cynomolgus Macaques

[0571] Non-human primate studies were performed at Biomere (Worcester, MA, USA) in accordance with their standard operating protocols and procedures approved by their IACUC. Male and female cynomolgus macaques, approximately 2 years of age, with a serum AAV9 neutralizing antibody titer of less than 1:3 were selected for in vivo studies. For all experiments, macaques were injected via an IV bolus injection. Animals were euthanized after 3 weeks and perfused with DPBS, after which CNS, muscle, and organ tissues were harvested. Tissue samples were preserved in RNAlater stabilization solution (Invitrogen, #AM7024) prior to downstream processing.

### Constructs

[0572] CMV-EGFP plasmids used to produce EGFP-encoding AAV9 and MDV1A were generated by cloning the cytomegalovirus (CMV) promoter, EGFP coding sequence, and bovine growth hormone polyadenylation signal (bGH pA) into the pZac2.1 construct purchased from the University of Pennsylvania vector core. The AAV capsid library recipient plasmid was generated by assembling the human synapsin 1 (hSyn) promoter, AAV2 rep, AAV9 cap, and SV40 polyadenylation signal into an ITR-containing backbone. The AAV9 cap gene on the library recipient plasmid was modified to contain BsmBI restriction sites immediately after Q486 and Q588 to facilitate insertion of a variable peptide sequence. The pZac2.1-CBh-hFXN-HA-bGH and pZac2.1-CBh-hFXN-FLAG-bGH plasmids were assembled by cloning the hybrid CBh promoter,⁴⁴ human frataxin coding sequence, HA tag, and bGH pA into the pZac2.1 plasmid backbone between the ITRs. As previously described, for the pooled characterization experiment, 12 bp barcodes were inserted immediately after the HA tag in the pZac2.1-CBh-hFXN-HA-bGH plasmid.³⁰ Each variant in the pooled characterization experiment was associated with 50 unique barcodes that were randomly generated with a minimum Hamming distance of four between any two barcodes.

[0573] First round AAV capsid library plasmids were prepared by amplifying a section of the AAV9 cap gene with an NNK degenerate reverse primer to produce fragments encoding every possible random 7-mer peptide insertion after Q588. These fragments were then introduced into the BsmBI-digested capsid library recipient plasmid. This library has a theoretical diversity of 20⁷ (1.28E+9) variants at the amino acid level, and we were able to identify at least 5E+6 unique capsid variants in our first-round capsid libraries based on next-generation sequencing. Second round libraries were generated through a similar method, but instead of NNK degenerate primers, a synthetic oligo pool (Agilent, Santa Clara, CA) was used to produce only selected variants of interest and synonymous DNA codon replicates. Libraries with the fixed PAL motif X₁X₂X₃PX₄QGTX₅R were generated with a reverse primer containing NNK degenerate codons at the variable positions X₁-X₅. All cloning was performed using the NEBuilder HiFi DNA assembly master mix (New England Biolabs, Ipswitch, MA).

### Capsid Library and Recombinant AAV Production

[0574] AAV capsid libraries and rAAVs were produced in HEK293 cells (CRL-1573, ATCC, Mannassas, VA) with the usual triple-plasmid transfection method.⁴⁵ Briefly, HEK293 cells were seeded into 15 cm dishes at a density of 2E+7 cells per dish and transfected the following day using PEI MAX (Polysciences, Warrington, PA). For individual rAAV production, cells were transfected with 16 μg pALDX-80 (Aldevron, Fargo, ND), 8 μg Rep2/Cap plasmid, and 8 μg of the ITR-containing transgene plasmid per dish. rAAVs were harvested from the cells and media and purified by ultracentrifugation over an iodixanol gradient as previously described.⁴⁵ A slightly modified protocol was used for the production of AAV capsid libraries. First, only 10 ng of the AAV capsid plasmid library was used per dish in order to prevent cross-packaging of variants and the formation of mosaic capsids, and 8 μg of pUC19 plasmid was included in the transfection to maintain the total amount of transfected plasmid. Second, 8 μg of Rep-AAP plasmid (a generous gift from Benjamin Deverman)²¹ was used in place of the Rep2/Cap plasmid. Finally, virus was harvested after 60 hours rather than the usual 120 hours in order to limit secondary transduction of virus-producing cells. All AAVs were titered by qPCR.

### In Vivo Selection in Mice and Cynomolgus Macaques

[0575] First- and second-round selections were performed in eight week old C57BL/6J and BALB/cJ mice and in two year old macaques. Six male and six female mice from each strain were used for each selection, and each mouse received a 1E+12 vg injected dose of either the AQ or DG capsid variant library. For the first round of selection in macaques, one male and one female were injected with 1E+13 vg/kg capsid library. For the second round of selection in macaques, two males and one female were injected with 3E+13 vg/kg AQ capsid library. For selection on the fixed PAL motif with modified flanking amino acids in macaques, two males were injected with 3E+13 vg/kg. In all selection experiments, three weeks after injection, animals were euthanized by perfusion with saline and whole brains were harvested. Spinal cords were additionally harvested from macaques. Fresh tissues were cut into 2 mm cubes and snap-frozen in liquid nitrogen before being stored at −80° C. Total RNA was extracted from at least 80% of the total tissue volume with TRIzol (Thermo Fisher, Waltham, MA) and mRNA was enriched from total RNA samples with oligo dT beads (New England Biolabs) and treated with Turbo DNase (Thermo Fisher). Subsequently, cDNA was synthesized with SuperScript IV reverse transcriptase (Thermo Fisher) and a capsid-specific primer (5′-GAAAGTTGCCGTCCGTGTGAGG-3′ (SEQ ID NO: 8590)). Capsid variant sequences were then amplified with Q5 High-Fidelity 2× master mix (New England Biolabs) and primers flanking the 7-mer insert (5′-ACAAGTGGCCACAAACCACCA-3′ (SEQ ID NO: 8591) and 5′-GGTTTTUAACCCAGCCGGTC-3′ (SEQ ID NO: 8592)) that added Illumina adaptors and unique indices (New England Biolabs). Amplicons were pooled at an equimolar ratio and sequenced on an Illumina NextSeq.

In Vivo rAAV Characterization

[0576] For comparison of vector genome delivery and transgene mRNA expression between AAV9 and MDV1A in mice, four male and four female 8 week old C57BL/6J mice and four male and four female 8 week old BALB/cJ mice were injected with 1E+12 vg of AAV9- or MDV1A-CMV-EGFP. Tissues were harvested two weeks after injection. For comparison of transgene expression via immunostaining, 8 week old C57BL/6J and BALB/cJ mice were injected with 5E+11 vg of AAV9- or MDV1A-CMV-EGFP. Tissues were again harvested two weeks after injection. For comparison of PAL2 and AAV9, one male two year old macaque was injected with 3E+13 vg/kg each of AAV9-CBh-hFXN-FLAG and PAL2-CBh-hFXN-HA. The macaque was euthanized by saline perfusion and tissues were harvested 3 weeks after injection.

[0577] For the pooled rAAV characterization experiment, eight in-house macaque-derived capsids, four in-house mouse-derived capsids, AAV.CAP-B10, AAV.CAP-B22, PHP.C2, and AAV9 were used to produce rAAVs packaging the barcoded CBh-hFXN-HA-bGH transgene. Equal amounts of each of the 16 barcoded rAAV pools were mixed and injected into two male and one female two year old macaques, three male and four female 8 week old C57BL/6J mice, and two male and two female 8 week old BALB/cJ mice. All animals were injected with a combined dose of 3E+13 vg/kg, or 1.875E+12 vg/kg per capsid variant. Animals were euthanized by saline perfusion and tissues were harvested 4 weeks after injection and total RNA was extracted and treated as described above, and macaque liver DNA was additionally isolated with QuickExtract DNA extract solution (Lucigen, Middleton, WI). cDNA was synthesized with a bGH pA-specific primer (5′-TTCACTGCATTCTAGTTGTGGTTTG-3′ (SEQ ID NO: 8583)) and DNA and cDNA were amplified with Q5 High-Fidelity 2X master mix and primers flanking the barcode region (5′-CCATACGATGTTCCAGATTACGC-3′ (SEQ ID NO: 8594) and 5′-CAATGTATCTTATCATGTCTGCTCGA-3′ (SEQ ID NO: 8595)). Amplicons with Illumina adapters and unique indices were pooled at equimolar ratios and sequenced on an Illumina NextSeq.

### Next Generation Sequencing Data Analysis

[0578] Next generation sequencing analysis of the results of selection experiments was performed as previously described.³⁰ Briefly, Illumina sequencing reads were demultiplexed with bcl2fastq2-v2.17.1 and the 21 bp variant sequence was extracted from each read. Variants were counted in each sample and normalized to the sequencing depth of the run to assign each variant a reads per million (RPM) score. Variants were ranked according to the ratio of variant RPM in the sample to variant RPM in the matched sequenced virus library sample to account for unequal distribution of variants in the injected virus library. The highest scoring amino acid variants from the first round of selection in each animal model (10,000 from mice and 20,000 from cynomolgus macaques) were chosen for the second round selection. For each such amino acid variant, a sequence encoding the same peptide by synonymous DNA codons was included in the design of the second-round library to control for DNA sequence-specific effects. For variants with multiple synonymous sequences already observed in experimental samples, the highest scoring synonymous variant was included. For other variants, an artificial sequence was generated by randomizing each codon in the original sequence to a synonymous codon where possible. 5% of variants in the second round library encoded stop codons and were artificially added to the library to control for cross-packaging events during virus library production. Following the second round of selection, DNA sequence variants were ranked as described above, and amino acid variants were ranked according to the sum of the ranks of the two corresponding synonymous sequences. Variants identified in the selection with the fixed PAL motif were ranked as in the first round of selection.

[0579] For the pooled rAAV characterization experiment, a ratio was calculated for each barcode of the sample RPM to the RPM of that barcode in the matched sequenced virus library. For each capsid variant, the 10 strongest and 5 weakest barcodes across all samples in the sequencing run were identified according to this metric and removed as outliers from downstream analysis. The remaining 35 midrange barcodes for each variant were then used to determine average transgene expression in each sample as described above.

### Macaque Variant Clustering

[0580] Pairwise dissimilarity scores between the top 1000 CNS-tropic capsid variants (corrected for synonymous DNA codon sequences) were calculated by adding the single-residue substitution score at each of the seven positions according to the BLOSUM62 substitution matrix. A matrix of dissimilarity scores was converted into a distance matrix by computing the distance metric d(s, t) between any two peptide sequences s and t by analogy with the scalar product as follows:

$$d ( s , t ) = \sqrt{〈 s \vert s 〉 + 〈 t \vert t 〉 - 2 〈 s \vert t 〉}$$

[0581] where [symbol] s|t [symbol] is the dissimilarity score between s and t.⁴⁶ This distance matrix was then used for k-medoids clustering with the scikit-learn package. The number of clusters k was chosen by maximizing the silhouette score.

### Computational Protein Modeling

[0582] Computational modeling of the VR-VIII loop of MDV1A, MDV1B, PAL1A, and PAL-like.1 was performed on the ProMod3-powered SWISS-MODEL server.^{47,48} AAV9 was used as a template for homology modeling (PDB: 3UX1)³² and all structures were visualized in PyMOL.

### Transgene Delivery and Expression Quantification

[0583] For transgene expression quantification, RNA was extracted from mouse and macaque tissues with TRIzol (Thermo Fisher) and treated with Turbo DNase (Thermo Fisher). cDNA was synthesized with SuperScript IV reverse transcriptase (Thermo Fisher) with an oligo-dT primer. For transgene delivery (vector genome quantification) experiments, DNA was extracted from mouse and macaque tissues with QuickExtract DNA extract solution (Lucigen) following pulverization of snap-frozen tissue with a Geno/Grinder 2010 (SPEX SamplePrep, Metuchen, NJ). Transgene mRNA and DNA were measured by qPCR using Taqman assays specific to the transgene (EGFP or HA- or FLAG-tagged hFN) mRNA or DNA or a housekeeping control (GAPDH). All measurements were quantified based on a standard curve generated by amplifying a gblock containing the target sequence of each Taqman assay, and absolute quantities of transgene mRNA and DNA were then normalized to the housekeeping gene.

### Histology

### Tissue Preparation

[0584] Whole brains harvested from mice were fixed in 4% PFA for 1 h at room temperature, washed with DPBS, and cryoprotected in 30% sucrose at 4° C. overnight. Tissues harvested from the macaque injected with PAL2- and AAV9-CBh-hFXN were fixed in 4% PFA overnight at 4° C. and washed 3 times with DPBS. Fixed macaque tissues were cryoprotected in 15% sucrose at 4° C. overnight and then 30% sucrose at 4° C. for up to 3 days. Cryoprotected tissues were then embedded in O.C.T. compound (Sakura Finetek USA, Torrance, CA) and snap frozen in liquid nitrogen-chilled isopentane. Frozen tissue blocks were sectioned at a thickness of 12 μm on a CM1860 cryostat (Leica Biosystems, Wetzlar, Germany) and mounted onto Superfrost Plus slides (VWR, Radnor, PA). Whole 5 mm coronal slabs of fixed macaque brain hemispheres were embedded in 4% low melting point agarose (Sigma-Aldrich, St. Louis, MO) and 40 μm free-floating sections were collected in DPBS using a VT1000S vibrating blade microtome (Leica Biosystems).

### Immunohistochemistry

[0585] IHCs were performed with an HRP micropolymer kit (ab236466, Abcam, Cambridge, UK) according to the manufacturer's instructions except where noted below. All primary antibody incubations on cryosections were performed at 4° C. overnight in blocking buffer containing 5% normal goat serum, 2% bovine serum albumin, 2% M.O.M. protein concentrate (Vector Labs, Burlingame, CA), and 0.1% Tween-20. Mouse brain cryosections were stained with a 1:1000 diluted rabbit anti-GFP primary antibody (A11122, Thermo Fisher). Following primary antibody incubation, sections were washed three times with PBS and incubated with HRP conjugate at RT for 30 minutes.

[0586] To visualize cells in the macaque brain expressing HA- or FLAG-tagged hFXN transgene, IHC was performed on 40 μm free-floating sections. Sections were blocked at room temperature for 1 hour in blocking buffer containing 5% normal goat serum with 0.2% Triton X-100 and then incubated with 1:7500 rabbit anti-HA antibody (ab9110, Abcam) in the same blocking buffer overnight at 4° C. with agitation. Following primary antibody incubation, sections were washed and incubated with 25% v/v HRP conjugate (ab236466, Abcam) diluted in PBS overnight at 4° C. with agitation.

[0587] For all IHC experiments, sections were washed with PBS following incubation with HRP conjugate and the signal was visualized with 3,3′-diaminobenzidine (Abcam) prepared according to the manufacturer's instructions for 3 minutes at RT. The free-floating macaque brain sections were then mounted onto HISTOBOND+ slides (Marienfeld, Lauda-Königshofen, Germany). Mouse sections were mounted with VectaMount AQ (Vector Labs). Macaque sections were dehydrated in a graded ethanol series, cleared with three changes of CitriSolv (Decon Laboratories, King of Prussia, PA), and mounted with VectaMount (Vector Labs). Sections were imaged on an EVOS M7000 all-in-one microscope using a 4× objective lens.

### Immunofluorescence

[0588] Cryosections of macaque brain, spinal cord, and neuroretina tissue were permeabilized for 10 minutes in 5% normal goat serum with 0.2% Triton X-100 before being blocked at room temperature for 1 hour in blocking buffer containing 5% normal goat serum, 2% bovine serum albumin, 2% M.O.M. protein concentrate (Vector Labs), and 0.1% Tween-20. Primary antibody incubations were performed overnight at 4° C. in blocking buffer; retina sections were labeled with 1:500 rabbit anti-HA (MA5-27915, Thermo Fisher) and 1:1000 mouse anti-rhodopsin (MA1-722, Thermo Fisher) antibodies, brain and spinal cord sections were labeled with 1:250 rabbit anti-HA (MA5-27915, Thermo Fisher) and 1:1000 mouse anti-NeuN (MA5-33103, Thermo Fisher) antibodies. Sections were washed three times with PBS before being incubated at room temperature for 30 minutes in blocking buffer with 1:500 goat anti-rabbit Alexa Fluor 488 (A11034, Thermo Fisher) and 1:500 goat anti-mouse Alexa Fluor 594 (A32742, Thermo Fisher) secondary antibodies. Brain and spinal cord sections were mounted with VECTASHIELD antifade mounting media (Vector Labs). Retina sections were treated with the TrueVIEW autofluorescence quenching kit (Vector Labs) according to the manufacturer's instructions and mounted with VECTASHIELD Vibrance antifade mounting media (Vector Labs). Sections were imaged on an EVOS M7000 all-in-one microscope using a 20X objective lens. Linear contrast adjustments were applied to images.

### Pathology

[0589] Macaque spinal cord and DRG sections were stained with hematoxylin and eosin (ab245880, Abcam) according to the usual method. A board-certified neuropathologist who was blinded to the experimental design reviewed anonymized slides and assigned a severity score between 0 (within normal limits) and five as previously described.³⁸ Severity scores were established for the spinal cord and DRG on sections from three segments each from the cervical, thoracic, and lumbar regions.

### Statistical Analysis

[0590] All statistical analyses were performed in GraphPad Prism v8 (GraphPad Software, San Diego, CA). All data are presented as mean±SD where applicable. Datasets were tested for normality using the Shapiro-Wilk test at a significance level of 0.01. All datasets were tested for outliers using the ROUT method and Q=0.5%. Outliers were identified and removed from AAV9-injected female C57BL6J spinal cord RNA and DNA (one outlier each, FIG. 15A-15F) and C57BL/6J brain and liver RNA (one outlier each where the entire animal was removed from analysis, FIG. 17A-17E). For comparisons between AAV9 and MDV1A (FIG. 15D-15E), differences were tested for significance with Welch's t-test with Holm-Šidák correction for multiple comparisons. For comparisons between AAV9 and multiple other variants (FIGS. 17A-17E and 20A-20B), differences were tested for significance with a one-way ANOVA assuming equal variance and Dunnett's multiple comparison test using AAV9 as a control mean. All statistical tests were performed on raw data without normalization to AAV9, though mRNA expression data are presented normalized to the mean of AAV9 expression for greater interpretability.

### References Related for Example 10

[0591] 1. Deverman, B. E., Ravina, B. M., Bankiewicz, K. S., Paul, S. M., and Sah, D. W. Y. (2018). Gene therapy for neurological disorders: progress and prospects. Nat Rev Drug Discov 17, 641-659.
[0592] 2. Ojala, D. S., Amara, D. P., and Schaffer, D. V. (2015). Adeno-Associated Virus Vectors and Neurological Gene Therapy. Neuroscientist 21, 84-98.
[0593] 3. Wu, Z., Asokan, A., and Samulski, R. J. (2006). Adeno-associated Virus Serotypes: Vector Toolkit for Human Gene Therapy. Molecular Therapy 14, 316-327.
[0594] 4. Naso, M. F., Tomkowicz, B., Perry, W. L., and Strohl, W. R. (2017). Adeno-Associated Virus (AAV) as a Vector for Gene Therapy. BioDrugs 31, 317-334.
[0595] 5. Hocquemiller, M., Giersch, L., Audrain, M., Parker, S., and Cartier, N. (2016). Adeno-Associated Virus-Based Gene Therapy for CNS Diseases. Hum Gene Ther 27, 478-496.
[0596] 6. Afione, S. A., Conrad, C. K., Kearns, W. G., Chunduru, S., Adams, R., Reynolds, T. C., Guggino, W. B., Cutting, G. R., Carter, B. J., and Flotte, T. R. (1996). In vivo model of adeno-associated virus vector persistence and rescue. J Virol 70, 3235-3241.
[0597] 7. Mendell, J. R., Al-Zaidy, S., Shell, R., Arnold, W. D., Rodino-Klapac, L. R., Prior, T. W., Lowes, L., Alfano, L., Berry, K., Church, K., et al. (2017). Single-Dose Gene-Replacement Therapy for Spinal Muscular Atrophy. N Engl J Med 377, 1713-1722.
[0598] 8. Foust, K. D., Wang, X., McGovern, V. L., Braun, L., Bevan, A. K., Haidet, A. M., Le, T. T., Morales, P. R., Rich, M. M., Burghes, A. H. M., et al. (2010). Rescue of the spinal muscular atrophy phenotype in a mouse model by early postnatal delivery of SMN. Nat Biotechnol 28, 271-274.
[0599] 9. Leone, P., Shera, D., McPhee, S. W. J., Francis, J. S., Kolodny, E. H., Bilaniuk, L. T., Wang, D.-J., Assadi, M., Goldfarb, O., Goldman, H. W., et al. (2012). Long-Term Follow-Up After Gene Therapy for Canavan Disease. Science Translational Medicine.
[0600] 10. Hwu, W.-L., Muramatsu, S., Tseng, S.-H., Tzen, K.-Y., Lee, N.-C., Chien, Y.-H., Snyder, R. O., Byrne, B. J., Tai, C.-H., and Wu, R.-M. (2012). Gene Therapy for Aromatic 1-Amino Acid Decarboxylase Deficiency. Science Translational Medicine.
[0601] 11. Saraiva, J., Nobre, R. J., and Pereira de Almeida, L. (2016). Gene therapy for the CNS using AAVs: The impact of systemic delivery by AAV9. Journal of Controlled Release 241, 94-109.
[0602] 12. Zincarelli, C., Soltys, S., Rengo, G., and Rabinowitz, J. E. (2008). Analysis of AAV Serotypes 1-9 Mediated Gene Expression and Tropism in Mice After Systemic Injection. Molecular Therapy 16, 1073-1080.
[0603] 13. Gray, S. J., Woodard, K. T., and Samulski, R. J. (2010). Viral vectors and delivery strategies for CNS gene therapy. Ther Deliv 1, 517-534.
[0604] 14. Foust, K. D., Nurre, E., Montgomery, C. L., Hernandez, A., Chan, C. M., and Kaspar, B. K. (2009). Intravascular AAV9 preferentially targets neonatal-neurons and adult-astrocytes in CNS. Nat Biotechnol 27, 59-65.
[0605] 15. Huang, L., Wan, J., Wu, Y., Tian, Y., Yao, Y., Yao, S., Ji, X., Wang, S., Su, Z., and Xu, H. (2021). Challenges in adeno-associated virus-based treatment of central nervous system diseases through systemic injection. Life Sciences 270, 119142.
[0606] 16. Liu, D., Zhu, M., Zhang, Y., and Diao, Y. (2021). Crossing the blood-brain barrier with AAV vectors. Metab Brain Dis 36, 45-52.
[0607] 17. Hinderer, C., Katz, N., Buza, E. L., Dyer, C., Goode, T., Bell, P., Richman, L. K., and Wilson, J. M. (2018). Severe Toxicity in Nonhuman Primates and Piglets Following High-Dose Intravenous Administration of an Adeno-Associated Virus Vector Expressing Human SMN. Hum Gene Ther 29, 285-298.
[0608] 18. Gao, G., Lu, Y., Calcedo, R., Grant, R. L., Bell, P., Wang, L., Figueredo, J., Lock, M., and Wilson, J. M. (2006). Biology of AAV Serotype Vectors in Liver-Directed Gene Transfer to Nonhuman Primates. Molecular Therapy 13, 77-87.
[0609] 19. Morales, L., Gambhir, Y., Bennett, J., and Stedman, H. H. (2020). Broader Implications of Progressive Liver Dysfunction and Lethal Sepsis in Two Boys following Systemic High-Dose AAV. Molecular Therapy 28, 1753-1755.
[0610] 20. Palazzi, X., Pardo, I., Sirivelu, M., Newman, L., Kumpf, S., Qian, J., Franks, T., Lopes, S., Liu, J., Monarski, L., et al. (2021). Biodistribution and Tolerability of AAV-PHP.B-CBh-SMN1 in Wistar Han Rats and Cynomolgus Macaques Reveal Different Toxicologic Profiles. Hum Gene Ther.
[0611] 21. Deverman, B. E., Pravdo, P. L., Simpson, B. P., Kumar, S. R., Chan, K. Y., Banerjee, A., Wu, W.-L., Yang, B., Huber, N., Pasca, S. P., et al. (2016). Cre-dependent selection yields AAV variants for widespread gene transfer to the adult brain. Nat Biotechnol 34, 204-209.
[0612] 22. Chan, K. Y., Jang, M. J., Yoo, B. B., Greenbaum, A., Ravi, N., Wu, W.-L., Sanchez-Guardado, L., Lois, C., Mazmanian, S. K., Deverman, B. E., et al. (2017). Engineered AAVs for efficient noninvasive gene delivery to the central and peripheral nervous systems. Nat. Neurosci. 20, 1172-1179.
[0613] 23. Kumar, S. R., Miles, T. F., Chen, X., Brown, D., Dobreva, T., Huang, Q., Ding, X., Luo, Y., Einarsson, P. H., Greenbaum, A., et al. (2020). Multiplexed Cre-dependent selection yields systemic AAVs for targeting distinct brain cell types. Nat Methods 17, 541-550.
[0614] 24. Nonnenmacher, M., Wang, W., Child, M. A., Ren, X.-Q., Huang, C., Ren, A. Z., Tocci, J., Chen, Q., Bittner, K., Tyson, K., et al. (2021). Rapid evolution of blood-brain-barrier-penetrating AAV capsids by RNA-driven biopanning. Molecular Therapy—Methods & Clinical Development 20, 366-378.
[0615] 25. Goertsen, D., Flytzanis, N. C., Goeden, N., Chuapoco, M. R., Cummins, A., Chen, Y., Fan, Y., Zhang, Q., Sharma, J., Duan, Y., et al. (2022). AAV capsid variants with brain-wide transgene expression and decreased liver targeting after intravenous delivery in mouse and marmoset. Nat Neurosci 25, 106-115.
[0616] 26. Hordeaux, J., Wang, Q., Katz, N., Buza, E. L., Bell, P., and Wilson, J. M. (2018). The Neurotropic Properties of AAV-PHP.B Are Limited to C57BIJ6J Mice. Molecular Therapy 26, 664-668.
[0617] 27. Huang, Q., Chan, K. Y., Tobey, I. G., Chan, Y. A., Poterba, T., Boutros, C. L., Balazs, A. B., Daneman, R., Bloom, J. M., Seed, C., et al. (2019). Delivering genes across the blood-brain barrier: LY6A, a novel cellular receptor for AAV-PHP.B capsids. PLOS ONE 14, e0225206.
[0618] 28. Mathiesen, S. N., Lock, J. L., Schoderboeck, L., Abraham, W. C., and Hughes, S. M. (2020). CNS Transduction Benefits of AAV-PHP.eB over AAV9 Are Dependent on Administration Route and Mouse Strain. Molecular Therapy—Methods & Clinical Development 19, 447-458.
[0619] 29. Matsuzaki, Y., Konno, A., Mochizuki, R., Shinohara, Y., Nitta, K., Okada, Y., and Hirai, H. (2018). Intravenous administration of the adeno-associated virus-PHP.B capsid fails to upregulate transduction efficiency in the marmoset brain. Neuroscience Letters 665, 182-188.
[0620] 30. Tabebordbar, M., Lagerborg, K. A., Stanton, A., King, E. M., Ye, S., Tellez, L., Krunnfusz, A., Tavakoli, S., Widrick, J. J., Messemer, K. A., et al. (2021). Directed evolution of a family of AAV capsid variants enabling potent muscle-directed gene delivery across species. Cell 184, 4919-4938.e22.
[0621] 31. B6mer, K., Kienle, E., Huang, L.-Y., Weinmann, J., Sacher, A., Bayer, P., Stillein, C., Fakhiri, J., Zimmermann, L., Westhaus, A., et al. (2020). Pre-arrayed Pan-AAV Peptide Display Libraries for Rapid Single-Round Screening. Molecular Therapy 28, 1016-1032.
[0622] 32. DiMattia, M. A., Nam, H.-J., Vliet, K. V., Mitchell, M., Bennett, A., Gurda, B. L., McKenna, R., Olson, N. H., Sinkovits, R. S., Potter, M., et al. (2012). Structural Insight into the Unique Properties of Adeno-Associated Virus Serotype 9. Journal of Virology.
[0623] 33. Samaranch, L., Salegio, E. A., San Sebastian, W., Kells, A. P., Foust, K. D., Bringas, J. R., Lamarre, C., Forsayeth, J., Kaspar, B. K., and Bankiewicz, K. S. (2012). Adeno-Associated Virus Serotype 9 Transduction in the Central Nervous System of Nonhuman Primates. Human Gene Therapy 23, 382-389.
[0624] 34. Aguirre, G. D. (2017). Concepts and Strategies in Retinal Gene Therapy. Investigative Ophthalmology & Visual Science 58, 5399-5411.
[0625] 35. Hordeaux, J., Hinderer, C., Goode, T., Buza, E. L., Bell, P., Calcedo, R., Richman, L. K., and Wilson, J. M. (2018). Toxicology Study of Intra-Cistema Magna Adeno-Associated Virus 9 Expressing Iduronate-2-Sulfatase in Rhesus Macaques. Mol Ther Methods Clin Dev 10, 68-78.
[0626] 36. Hordeaux, J., Buza, E. L., Dyer, C., Goode, T., Mitchell, T. W., Richman, L., Denton, N., Hinderer, C., Katz, N., Schmid, R., et al. (2020). Adeno-Associated Virus-Induced Dorsal Root Ganglion Pathology. Human Gene Therapy 31, 808-818.
[0627] 37. Perez, B. A., Shutterly, A., Chan, Y. K., Byrne, B. J., and Corti, M. (2020). Management of Neuroinflammatory Responses to AAV-Mediated Gene Therapies for Neurodegenerative Diseases. Brain Sciences 10, 119.
[0628] 38. Hordeaux, J., Buza, E. L., Jeffrey, B., Song, C., Jahan, T., Yuan, Y., Zhu, Y., Bell, P., Li, M., Chichester, J. A., et al. (2020). MicroRNA-mediated inhibition of transgene expression reduces dorsal root ganglion toxicity by AAV vectors in primates. Science Translational Medicine 12, eaba9188.
[0629] 39. Novartis announces AVXS-101 intrathecal study update Novartis. https://www.novartis.com/news/media-releases/novartis-announces-avxs-101-intrathecal-study-update.
[0630] 40. Geisler, A., Jungmann, A., Kurreck, J., Poller, W., Katus, H. A., Vetter, R., Fechner, H., and Müller, O. J. (2011). microRNA122-regulated transgene expression increases specificity of cardiac gene transfer upon intravenous delivery of AAV9 vectors. Gene Ther 18, 199-209.
[0631] 41. Qiao, C., Yuan, Z., Li, J., He, B., Zheng, H., Mayer, C., Li, J., and Xiao, X. (2011). Liver-specific microRNA-122 target sequences incorporated in AAV vectors efficiently inhibits transgene expression in the liver. Gene Ther 18, 403-410.
[0632] 42. Xie, J., Xie, Q., Zhang, H., Ameres, S. L., Hung, J.-H., Su, Q., He, R., Mu, X., Seher Ahmed, S., Park, S., et al. (2011). MicroRNA-regulated, Systemically Delivered rAAV9: A Step Closer to CNS-restricted Transgene Expression. Molecular Therapy 19, 526-535.
[0633] 43. Geisler, A., and Fechner, H. (2016). MicroRNA-regulated viral vectors for gene therapy. World J Exp Med 6, 37-54.
[0634] 44. Gray, S. J., Foti, S. B., Schwartz, J. W., Bachaboina, L., Taylor-Blake, B., Coleman, J., Ehlers, M. D., Zylka, M. J., McCown, T. J., and Samulski, R. J. (2011). Optimizing Promoters for Recombinant Adeno-Associated Virus-Mediated Gene Expression in the Peripheral and Central Nervous System Using Self-Complementary Vectors. Hum Gene Ther 22, 1143-1153.
[0635] 45. Challis, R. C., Ravindra Kumar, S., Chan, K. Y., Challis, C., Beadle, K., Jang, M. J., Kim, H. M., Rajendran, P. S., Tompkins, J. D., Shivkumar, K., et al. (2019). Systemic AAV vectors for widespread and targeted gene delivery in rodents. Nat Protoc 14, 379-414.
[0636] 46. Fischer, I. (2002). Similarity-preserving Metrics for Amino-acid Sequences. In.
[0637] 47. Studer, G., Tauriello, G., Bienert, S., Biasini, M., Johner, N., and Schwede, T. (2021). ProMod3—A versatile homology modelling toolbox. PLOS Computational Biology 17, e1008667.
[0638] 48. Waterhouse, A., Bertoni, M., Bienert, S., Studer, G., Tauriello, G., Gumienny, R.,
[0639] Heer, F. T., de Beer, T. A. P., Rempfer, C., Bordoli, L., et al. (2018). SWISS-MODEL: homology modelling of protein structures and complexes. Nucleic Acids Research 46, W296-W303.

[0640] Various modifications and variations of the described methods, pharmaceutical compositions, and kits of the invention will be apparent to those skilled in the art without departing from the scope and spirit of the invention. Although the invention has been described in connection with specific embodiments, it will be understood that it is capable of further modifications and that the invention as claimed should not be unduly limited to such specific embodiments. Indeed, various modifications of the described modes for carrying out the invention that are obvious to those skilled in the art are intended to be within the scope of the invention. This application is intended to cover any variations, uses, or adaptations of the invention following, in general, the principles of the invention and including such departures from the present disclosure come within known customary practice within the art to which the invention pertains and may be applied to the essential features herein before set forth.

The application's sequence listing, which the Patent Office published only in electronic form, follows.

SEQUENCE LISTING (8614 sequences)

SEQ ID NO: 1 - protein, 736 aa, adeno-associated virus 9
MAADGYLPDWLEDNLSEGIREWWALKPGAPQPKANQQHQDNARGLVLPGYKYLGPGNGLDKGEPVNAADAAALEHDKAYDQQLKAGDNPYLKYNHADAEFQERLKEDTSFGGNLGRAVFQAKKRLLEPLGLVEEAAKTAPGKKRPVEQSPQEPDSSAGIGKSGAQPAKKRLNFGQTGDTESVPDPQPIGEPPAAPSGVGSLTMASGGGAPVADNNEGADGVGSSSGNWHCDSQWLGDRVITTSTRTWALPTYNNHLYKQISNSTSGGSSNDNAYFGYSTPWGYFDFNRFHCHFSPRDWQRLINNNWGFRPKRLNFKLFNIQVKEVTDNNGVKTIANNLTSTVQVFTDSDYQLPYVLGSAHEGCLPPFPADVFMIPQYGYLTLNDGSQAVGRSSFYCLEYFPSQMLRTGNNFQFSYEFENVPFHSSYAHSQSLDRLMNPLIDQYLYYLSKTINGSGQNQQTLKFSVAGPSNMAVQGRNYIPGPSYRQQRVSTTVTQNNNSEFAWPGASSWALNGRNSLMNPGPAMASHKEGEDRFFPLSGSLIFGKQGTGRDNVDADKVMITNEEEIKTTNPVATESYGQVATNHQSAQAQAQTGWVQNQGILPGMVWQDRDVYLQGPIWAKIPHTDGNFHPSPLMGGFGMKHPPPQILIKNTPVPADPPTAFNKDKLNSFITQYSTGQVSVEIEWELQKENSKRWNPEIQYTSNYYKSNNVEFAVNTEGVYSEPRPIGTRYLTRNL

SEQ ID NO: 2 - protein, 8 aa, synthetic construct
  REGION 1..8: note = Synthetic n-mer insert
  SITE 2: note = misc_feature - Xaa can be any naturally occurring amino acid
  SITE 6: note = misc_feature - Xaa can be any naturally occurring amino acid
  SITE 8: note = misc_feature - Xaa can be any naturally occurring amino acid wherein the numberof amino acids is 0, 1, 2, 3, 4, 5, 6, or 7
PXQGTXRX

SEQ ID NO: 3 - protein, 7 aa, synthetic construct
  REGION 1..7: note = Synthetic n-mer insert
KTVGTVY

SEQ ID NO: 4 - protein, 7 aa, synthetic construct
  REGION 1..7: note = Synthetic n-mer insert
RSVGSVY

SEQ ID NO: 5 - protein, 7 aa, synthetic construct
  REGION 1..7: note = Synthetic n-mer insert
RYLGDAS

SEQ ID NO: 6 - protein, 7 aa, synthetic construct
  REGION 1..7: note = Synthetic n-mer insert
WVLPSGG

SEQ ID NO: 7 - protein, 7 aa, synthetic construct
  REGION 1..7: note = Synthetic n-mer insert
VTVGSIY

SEQ ID NO: 8 - protein, 7 aa, synthetic construct
  REGION 1..7: note = Synthetic n-mer insert
VRGSSIL

SEQ ID NO: 9 - protein, 7 aa, synthetic construct
  REGION 1..7: note = Synthetic n-mer insert
RHHGDAA

SEQ ID NO: 10 - protein, 7 aa, synthetic construct
  REGION 1..7: note = Synthetic n-mer insert
VIQAMKL

SEQ ID NO: 11 - protein, 7 aa, synthetic construct
  REGION 1..7: note = Synthetic n-mer insert
LTYGMAQ

SEQ ID NO: 12 - protein, 7 aa, synthetic construct
  REGION 1..7: note = Synthetic n-mer insert
LRIGLSQ

SEQ ID NO: 13 - protein, 7 aa, synthetic construct
  REGION 1..7: note = Synthetic n-mer insert
GDYSMIV

SEQ ID NO: 14 - protein, 7 aa, synthetic construct
  REGION 1..7: note = Synthetic n-mer insert
VNYSVAL

SEQ ID NO: 15 - protein, 7 aa, synthetic construct
  REGION 1..7: note = Synthetic n-mer insert
RHIADAS

SEQ ID NO: 16 - protein, 7 aa, synthetic construct
  REGION 1..7: note = Synthetic n-mer insert
RYLGDAT

SEQ ID NO: 17 - protein, 7 aa, synthetic construct
  REGION 1..7: note = Synthetic n-mer insert
QRVGFAQ

SEQ ID NO: 18 - protein, 8 aa, synthetic construct
  REGION 1..8: note = Synthetic n-mer insert
QIAHGYST

SEQ ID NO: 19 - protein, 7 aa, synthetic construct
  REGION 1..7: note = Synthetic n-mer insert
WTLESGH

SEQ ID NO: 20 - protein, 7 aa, synthetic construct
  REGION 1..7: note = Synthetic n-mer insert
GENSARW

SEQ ID NO: 21 - protein, 7 aa, synthetic construct
  REGION 1..7: note = Synthetic n-mer insert
REQQKLW

SEQ ID NO: 22 - protein, 7 aa, synthetic construct
  REGION 1..7: note = Synthetic n-mer insert
ASNPGRW

SEQ ID NO: 23 - protein, 7 aa, synthetic construct
  REGION 1..7: note = Synthetic n-mer insert
WTLESGH

SEQ ID NO: 24 - protein, 7 aa, synthetic construct
  REGION 1..7: note = Synthetic n-mer insert
REQKKLW

SEQ ID NO: 25 - protein, 7 aa, synthetic construct
  REGION 1..7: note = Synthetic n-mer insert
ERLLVQL

SEQ ID NO: 26 - protein, 7 aa, synthetic construct
  REGION 1..7: note = Synthetic n-mer insert
RMQRTLY

SEQ ID NO: 27 - protein, 9 aa, synthetic construct
  REGION 1..9: note = Synthetic glycine-serine linker
GGSGGSGGS

SEQ ID NO: 28 - protein, 7 aa, Simian virus 40
PKKKRKV

SEQ ID NO: 29 - protein, 10 aa, Simian virus 40
PKKKRKVEAS

SEQ ID NO: 30 - protein, 16 aa, synthetic construct
  REGION 1..16: note = Synthetic nucleoplasmin bipartite NLS
KRPAATKKAGQAKKKK

SEQ ID NO: 31 - protein, 9 aa, Homo sapiens
PAAKRVKLD

SEQ ID NO: 32 - protein, 11 aa, Homo sapiens
RQRRNELKRSP

SEQ ID NO: 33 - protein, 38 aa, Homo sapiens
NQSSNFGPMKGGNFGGRSSGPYGGGGQYFAKPRNQGGY

SEQ ID NO: 34 - protein, 42 aa, Homo sapiens
RMRIZFKNKGKDTAELRRRRVEVSVELRKAKKDEQILKRRNV

SEQ ID NO: 35 - protein, 8 aa, Homo sapiens
VSRKRPRP

SEQ ID NO: 36 - protein, 8 aa, Homo sapiens
PPKKARED

SEQ ID NO: 37 - protein, 8 aa, Homo sapiens
PQPKKKPL

SEQ ID NO: 38 - protein, 12 aa, Mus sp.
SALIKKKKKMAP

SEQ ID NO: 39 - protein, 5 aa, Influenza virus
DRLRR

SEQ ID NO: 40 - protein, 7 aa, Influenza virus
PKQKKRK

SEQ ID NO: 41 - protein, 10 aa, Hepatitis D virus
RKLKKKIKKL

SEQ ID NO: 42 - protein, 10 aa, Mus sp.
REKKKFLKRR

SEQ ID NO: 43 - protein, 20 aa, Homo sapiens
KRKGDEVDGVDEVAKKKSKK

SEQ ID NO: 44 - protein, 17 aa, Homo sapiens
RKCLQAGMNLEARKTKK

SEQ ID NO: 45 - protein, 401 aa, synthetic construct
  REGION 1..401: note = Synthetic IscB protein
MSTDATLIRTTPSHAEADATDTLVATPLMPPRRVISPWPGPGEGQSLMRIPVVDIRGMALMPCTPAKARHLLKSGNARPKRNKLGLFYVQLSYEQEPDNQSLVAGVDPGSKFEGLSVVGTKDTVLNLMVEAPDHVKGAVQTRRTMRRARRQRKWRRPKRFHNRLNRMQRIPPSTRSRWEAKARIVAHLRTILPFTDVVVEDVQAVTRKGKGGTWNGSFSPVQVGKEHLYRLLRAMGLTLHLREGWQTKELREQHGLKKTKSKSKQSFESHAVDSWVLAASISGAEHPTCTRLWYMVPAILHRRQLHRLQASKGGVRKPYGGTRSLGVKRGTLVEHKKYGRCTVGGVDRKRNTISLHEYRTNTRLTQAAKVETCRVLTWLSWRSWLLRGKRTSSKGKGSHSS

SEQ ID NO: 46 - protein, 432 aa, synthetic construct
  REGION 1..432: note = Synthetic IscB protein
MQPAKQQNWVFQINGDKQPLDMINPGRCRELQNRGKLASFRRFPYVVIQQQTIENPQTKEYILKIDPGSQWTGFAIQCGNDILFRAELNHRGEAIKFDLVKRAWFRRGRRSRNLRYRKKRLNRAKPEGWLAPSIRHRVLTVETWIKRFMRYCPIAWIEIEQVRFDTQKLANPEIDGVEYQQGELQGYEVREYLLQKWGRKCAYCGTENVPLEVEHIQSKSKGGSSRIGNLTLACHVCNVKKGNLDVRDFLAKSPDILNQVLENSTKPLKDAAAVNSTRYAIVKMAKSICENVKCSSGARTKMNRVRQGLEKTHSLDAACVGESGASIRVLTDRPLLITCKGHGSRQSIRVNASGFPAVKNAKTVFTHIAAGDVVRFTIGKDRKKAQAGTYTARVKTPTPKGFEVLIDGARISLSTMSNVVFVHRSDGYGYEL

SEQ ID NO: 47 - protein, 461 aa, synthetic construct
  REGION 1..461: note = Synthetic IscB protein
MAVFVIDKHKRPLMPCSEKRARLLLERGRAVVHRQVPFVIRLKDRTVQHSAVQPLRVALDPGSRATGMALVREKNTVDTGTGEVYRERIALNLFELVHRGHRIREQLDQRRNFRRRRRGANLRYRAPRFDNRRRPPGWLAPSLQHRVDTTMAWVRRLCRWAPASAIGIETVRFDTQRLQNPEISGVEYQQGALAGCEVREYLLEKWGRKCAYCGAENVPLEIEHIVPKSRGGSDRVSNLALACRACNQAKGNRDVRAFLADQPERLARILAQAKAPLKDAAAVNATRWALYRALVDTGLPVEAGTGGRTKWNRTRLGLPKTHALDALCVGQVDQVRHWRVPVLGIRCAGRGSYRRTRLTRHGFPRGYLTRNKSAFGFQTGDLIRAVVTKGKKAGTYLGRIAIRASGSFNIQTPMGVVQGIHHRFCTLLQRADGYGYFVQPKPTEAALSSPRLKAGVSSAGN

SEQ ID NO: 48 - protein, 439 aa, synthetic construct
  REGION 1..439: note = Synthetic IscB protein
MTTNVVFVIDTNQKPLQPCSAAVARKLLLRGKAAMFRRYPAVIILKKEVDSVGKPKIELRIDPGSKYTGFALVDSKDNADFIIWGTELEHRGAAICKELTKRSAIRRSRRNRKTRYRKKRFERRKPEGWLAPSLQHRVDTTLTWVKRICKFVPIMSISVEQVKFDLQKLENSDIQGIEYQQGTLAGYTLREALLEHWGRKCAYCDVENVFLEIEHIYPKSKGGSDKFSNLTLACHKCNINKGNKSIDEFLLSDHKRLEQIKLHQKKTLKDAAAVNATRKKLVTTLQEKTFLNVLVSDGASTKMTRLSSSLAKRHWIDAGCVNTTLIVILKTLQPLQVKCNGHGNKQFVTMDAYGFPRKSYEPKKVRKDWKAGDIIRVTKKDGTMLMGRVKKAAKKLVYIPFGGKEASFSSENAKAIHRSDGYRYSFAAIDSELLQKMAT

SEQ ID NO: 49 - protein, 419 aa, synthetic construct
  REGION 1..419: note = Synthetic IscB protein
MPNKYAFVLDSKGKLLDPTKSKKAWYLIRKGKASLVEEYPLIIKLKREVPKDQVNSDKLILGIDDGTKKVGFALVQKCQTKNKVLFKAVMEQRQDVSKKMEERRGYRRYRRSHKRYRPARFDNRSSSKRKGRIPPSILQKKQAILRVVNKLKKYIRIDKIVLEDVSIDIRKLTEGRELYNWEYQESNRLDENLRKATLYRDDCTCQLCGTTETMLHAHHIMPRRDGGADSIYNLITLCKACHKDKVDNNEYQYKDQFLAIIDSKELSDLKSASHVMQGKTWLRDKLSKIAQLEITSGGNTANKRIDYEIEKSHSNDAICTTGLLPVDNIDDIKEYYIKPLRKKSKAKIKELKCFRQRDLVKYTKRNGETYTGYITSLRIKNNKYNSKVCNFSTLKGKIFRGYGFRNLTLLNRPKGLMIV

SEQ ID NO: 50 - protein, 1409 aa, synthetic construct
  REGION 1..1409: note = Synthetic IscB protein
MLFNKCIIISINLDFSNKEKCMTKPYSIGLDIGTNSVGWAVITDNYKVPSKKMKVLGNTSKKYIKKNLLGVLLFDSGITAEGRRLKRTARRRYTRRRNRILYLQEIFSTEMATLDDAFFQRLDDSFLVPDDKRDSKYPIFGNLVEEKVYHDEFPTIYHLRKYLADSTKKADLRLVYLALAHMIKYRGHFLIEGEFNSKNNDIQKNFQDFLDTYNAIFESDLSLENSKQLEEIVKDKISKLEKKDRILKLFPGEKNSGIFSEFLKLIVGNQADFRKCFNLDEKASLHFSKESYDEDLETLLGYIGDDYSDVFLKAKKLYDAILLSGFLTVTDNETEAPLSSAMIKRYNEHKEDLALLKEYIRNISLKTYNEVFKDDTKNGYAGYIDGKTNQEDFYVYLKNLLAEFEGADYFLEKIDREDFLRKQRTFDNGSIPYQIHLQEMRAILDKQAKFYPFLAKNKERIEKILTFRIPYYVGPLARGNSDFAWSIRKRNEKITPWNFEDVIDKESSAEAFINRMTSFDLYLPEEKVLPKHSLLYETFNVYNELTKVRFIAESMRDYQFLDSKQKKDIVRLYFKDKRKVTDKDIIEYLHAIYGYDGIELKGIEKQFNSSLSTYHDLLNIINDKEFLDDSSNEAIIEEIIHTLTIFEDREMIKQRLSKFENIFDKSVLKKLSRRHYTGWGKLSAKLINGIRDEKSGNTILDYLIDDGISNRNFMQLIHDDALSFKKKIQKAQIIGDEDKGNIKEVVKSLPGSPAIKKGILQSIKIVDELVKVMGGRKPESIVVEMARENQYTNQGKSNSQQRLKRLEKSLKELGSKILKENIPAKLSKIDNNALQNDRLYLYYLQNGKDMYTGDDLDIDRLSNYDIDHIIPQAFLKDNSIDNKVLVSSASNRGKSDDFPSLEVVKKRKTFWYQLLKSKLISQRKFDNLTKAERGGLLPEDKAGFIQRQLVETRQITKHVARLLDEKFNNKKDENNRAVRTVKIITLKSTLVSQFRKDFELYKVREINDFHHAHDAYLNAVIASALLKKYPKLEPEFVYGDYPKYNSFRERKSATEKVYFYSNIMNIFKKSISLADGRVIERPLIEVNEETGESVWNKESDLATVRRVLSYPQVNVVKKVEEQNHGLDRGKPKGLFNANLSSKPKPNSNENLVGAKEYLDPKKYGGYAGISNSFAVLVKGTIEKGAKKKITNVLEFQGISILDRINYRKDKLNFLLEKGYKDIELIIELPKYSLFELSDGSRRMLASILSTNNKRGEIHKGNQIFLSQKFVKLLYHAKRISNTINENHRKYVENHKKEFEELFYYILEFNENYVGAKKNGKLLNSAFQSWQNHSIDELCSSFIGPTGSERKGLFELTSRGSAADFEFLGVKIPRYRDYTPSSLLKDATLIHQSVTGLYETRIDLAKLGEG

SEQ ID NO: 51 - protein, 1053 aa, synthetic construct
  REGION 1..1053: note = Synthetic IscB protein
MKRNYILGLDIGITSVGYGIIDYETRDVIDAGVRLFKEANVENNEGRRSKRGARRLKRRRRHRIQRVKKLLFDYNLLTDHSELSGINPYEARVKGLSQKLSEEEFSAALLHLAKRRGVHNVNEVEEDTGNELSTKEQISRNSKALEEKYVAELQLERLKKDGEVRGSINRFKTSDYVKEAKQLLKVQKAYHQLDQSFIDTYIDLLETRRTYYEGPGEGSPFGWKDIKEWYEMLMGHCTYFPEELRSVKYAYNADLYNALNDLNNLVITRDENEKLEYYEKFQIIENVFKQKKKPTLKQIAKEILVNEEDIKGYRVTSTGKPEFTNLKVYHDIKDITARKEIIENAELLDQIAKILTIYQSSEDIQEELTNLNSELTQEEIEQISNLKGYTGTHNLSLKAINLILDELWHTNDNQIAIFNRLKLVPKKVDLSQQKEIPTTLVDDFILSPVVKRSFIQSIKVINAIIKKYGLPNDIIIELAREKNSKDAQKMINEMQKRNRQTNERIEEIIRTTGKENAKYLIEKIKLHDMQEGKCLYSLEAIPLEDLLNNPFNYEVDHIIPRSVSFDNSFNNKVLVKQEENSKKGNRTPFQYLSSSDSKISYETFKKHILNLAKGKGRISKTKKEYLLEERDINRFSVQKDFINRNLVDTRYATRGLMNLLRSYFRVNNLDVKVKSINGGFTSFLRRKWKFKKERNKGYKHHAEDALIIANADFIFKEWKKLDKAKKVMENQMFEEKQAESMPEIETEQEYKEIFITPHQIKHIKDFKDYKYSHRVDKKPNRELINDTLYSTRKDDKGNTLIVNNLNGLYDKDNDKLKKLINKSPEKLLMYHHDPQTYQKLKLIMEQYGDEKNPLYKYYEETGNYLTKYSKKDNGPVIKKIKYYGNKLNAHLDITDDYPNSRNKVVKLSLKPYRFDVYLDNGVYKFVTVKNLDVIKKENYYEVNSKCYEEAKKLKKISNQAEFIASFYNNDLIKINGELYRVIGVNNDLLNRIEVNMIDITYREYLENMNDKRPPRIIKTIASKTQSIKKYSTDILGNLYEVKSKKHPQIIKKG

SEQ ID NO: 52 - protein, 1365 aa, Streptococcus pyogenes SF370
KYSIGLDIGTNSVGWAVITDEYKVPSKKFKVLGNTDRHSIKKNLIGALLFDSGETAEATRLKRTARRRYTRRKNRICYLQEIFSNEMAKVDDSFFHRLEESFLVEEDKKHERHPIFGNIVDEVAYHEKYPTIYHLRKKLVDSTDKADLRLIYLALAHMIKFRGHFLIEGDLNPDNSDVDKLFIQLVQTYNQLFEENPINASGVDAKAILSARLSKSRRLENLIAQLPGEKKNGLFGNLIALSLGLTPNFKSNFDLAEDAKLQLSKDTYDDDLDNLLAQIGDQYADLFLAAKNLSDAILLSDILRVNTEITKAPLSASMIKRYDEHHQDLTLLKALVRQQLPEKYKEIFFDQSKNGYAGYIDGGASQEEFYKFIKPILEKMDGTEELLVKLNREDLLRKQRTFDNGSIPHQIHLGELHAILRRQEDFYPFLKDNREKIEKILTFRIPYYVGPLARGNSRFAWMTRKSEETITPWNFEEVVDKGASAQSFIERMTNFDKNLPNEKVLPKHSLLYEYFTVYNELTKVKYVTEGMRKPAFLSGEQKKAIVDLLFKTNRKVTVKQLKEDYFKKIECFDSVEISGVEDRFNASLGTYHDLLKIIKDKDFLDNEENEDILEDIVLTLTLFEDREMIEERLKTYAHLFDDKVMKQLKRRRYTGWGRLSRKLINGIRDKQSGKTILDFLKSDGFANRNFMQLIHDDSLTFKEDIQKAQVSGQGDSLHEHIANLAGSPAIKKGILQTVKVVDELVKVMGRHKPENIVIEMARENQTTQKGQKNSRERMKRIEEGIKELGSQILKEHPVENTQLQNEKLYLYYLQNGRDMYVDQELDINRLSDYDVDHIVPQSFLKDDSIDNKVLTRSDKNRGKSDNVPSEEVVKKMKNYWRQLLNAKLITQRKFDNLTKAERGGLSELDKAGFIKRQLVETRQITKHVAQILDSRMNTKYDENDKLIREVKVITLKSKLVSDFRKDFQFYKVREINNYHHAHDAYLNAVVGTALIKKYPKLESEFVYGDYKVYDVRKMIAKSEQEIGKATAKYFFYSNIMNFFKTEITLANGEIRKRPLIETNGETGEIVWDKGRDFATVRKVLSMPQVNIVKKTEVQTGGFSKESILPKRNSDKLIARKKDWDPKKYGGFDSPTVAYSVLVVAKVEKGKSKKLKSVKELLGITIMERSSFEKNPIDFLEAKGYKEVKKDLIIKLPKYSLFELENGRKRMLASAGELQKGNELALPSKYVNFLYLASHYEKLKGSPEDNEQKQLFVEQHKHYLDEIIEQISEFSKRVILADANLDKVLSAYNKHRDKPIREQAENIIHLFTLTNLGAPAAFKYFDTTIDRKRYTSTKEVLDATLIHQSITGLYETRIDLSQLGGD

SEQ ID NO: 53 - protein, 288 aa, synthetic construct
  REGION 1..288: note = Synthetic N-terminal capping region
MDPIRSRTPSPARELLSGPQPDGVQPTADRGVSPPAGGPLDGLPARRTMSRTRLPSPPAPSPAFSADSFSDLLRQFDPSLFNTSLFDSLPPFGAHHTEAATGEWDEVQSGLRAADAPPPTMRVAVTAARPPRAKPAPRRRAAQPSDASPAAQVDLRTLGYSQQQQEKIKPKVRSTVAQHHEALVGHGFTHAHIVALSQHPAALGTVAVKYQDMIAALPEATHEAIVGVGKQWSGARALEALLTVAGELRGPPLQLDTGQLLKIAKRGGVTAVEAVHAWRNALTGAPLN

SEQ ID NO: 54 - protein, 182 aa, synthetic construct
  REGION 1..182: note = Synthetic C-terminal capping region
RPALESIVAQLSRPDPALAALTNDHLVALACLGGRPALDAVKKGLPHAPALIKRTNRRIPERTSHRVADHAQVVRVLGFFQCHSHPAQAFDDAMTQFGMSRHGLLQLFRRVGVTELEARSGTLPPASQRWDRILQASGMKRAKPSPTSTQTPDQASLHAFADSLERDLDAPSPMHEGDQTRA

SEQ ID NO: 55 - protein, 5 aa, synthetic construct
  REGION 1..5: note = Synthetic peptide
VITYF

SEQ ID NO: 56 - protein, 5 aa, synthetic construct
  REGION 1..5: note = Synthetic peptide
VVVVV

SEQ ID NO: 57 - protein, 7 aa, synthetic construct
  REGION 1..7: note = Synthetic peptide
KPWWPRR

SEQ ID NO: 58 - protein, 9 aa, synthetic construct
  REGION 1..9: note = Synthetic peptide
NIVNVSLVK

SEQ ID NO: 59 - protein, 5 aa, synthetic construct
  REGION 1..5: note = Synthetic peptide
LPFFD

SEQ ID NO: 60 - protein, 4 aa, synthetic construct
  REGION 1..4: note = Synthetic peptide
KLVF

SEQ ID NO: 61 - protein, 7 aa, synthetic construct
  REGION 1..7: note = Synthetic peptide
PGKLVYA

SEQ ID NO: 62 - protein, 7 aa, synthetic construct
  REGION 1..7: note = Synthetic peptide
LVEALYL

SEQ ID NO: 63 - protein, 6 aa, synthetic construct
  REGION 1..6: note = Synthetic peptide
RGFFYT

SEQ ID NO: 64 - protein, 7 aa, synthetic construct
  REGION 1..7: note = Synthetic n-mer insert
REQQKLY

SEQ ID NO: 65 - protein, 9 aa, synthetic construct
  REGION 1..9: note = Synthetic n-mer insert
AQRSVGSVY

SEQ ID NO: 66 - protein, 9 aa, synthetic construct
  REGION 1..9: note = Synthetic n-mer insert
AQKTVGTVY

SEQ ID NO: 67 - protein, 9 aa, synthetic construct
  REGION 1..9: note = Synthetic n-mer insert
AQRYLGDAS

SEQ ID NO: 68 - protein, 9 aa, synthetic construct
  REGION 1..9: note = Synthetic n-mer insert
DGREQQKLW

SEQ ID NO: 69 - protein, 9 aa, synthetic construct
  REGION 1..9: note = Synthetic n-mer insert
AQWVLPSGG

SEQ ID NO: 70 - protein, 9 aa, synthetic construct
  REGION 1..9: note = Synthetic n-mer insert
AQVTVGSIY

SEQ ID NO: 71 - protein, 9 aa, synthetic construct
  REGION 1..9: note = Synthetic n-mer insert
AQVRGSSIL

SEQ ID NO: 72 - protein, 9 aa, synthetic construct
  REGION 1..9: note = Synthetic n-mer insert
AQRHHGDAA

SEQ ID NO: 73 - protein, 9 aa, synthetic construct
  REGION 1..9: note = Synthetic n-mer insert
AQVIQAMKL

SEQ ID NO: 74 - protein, 9 aa, synthetic construct
  REGION 1..9: note = Synthetic n-mer insert
AQLTYGMAQ

SEQ ID NO: 75 - protein, 9 aa, synthetic construct
  REGION 1..9: note = Synthetic n-mer insert
AQLRIGLSQ

SEQ ID NO: 76 - protein, 9 aa, synthetic construct
  REGION 1..9: note = Synthetic n-mer insert
AQGDYSMIV

SEQ ID NO: 77 - protein, 9 aa, synthetic construct
  REGION 1..9: note = Synthetic n-mer insert
AQVNYSVAL

SEQ ID NO: 78 - protein, 9 aa, synthetic construct
  REGION 1..9: note = Synthetic n-mer insert
AQRYSGDAS

SEQ ID NO: 79 - protein, 9 aa, synthetic construct
  REGION 1..9: note = Synthetic n-mer insert
AQRYSGDSV

SEQ ID NO: 80 - protein, 9 aa, synthetic construct
  REGION 1..9: note = Synthetic n-mer insert
AQRHIADAS

SEQ ID NO: 81 - protein, 9 aa, synthetic construct
  REGION 1..9: note = Synthetic n-mer insert
AQRYLGDAT

SEQ ID NO: 82 - protein, 9 aa, synthetic construct
  REGION 1..9: note = Synthetic n-mer insert
AQQRVGFAQ

SEQ ID NO: 83 - protein, 9 aa, synthetic construct
  REGION 1..9: note = Synthetic n-mer insert
AQIAHGYST

SEQ ID NO: 84 - protein, 9 aa, synthetic construct
  REGION 1..9: note = Synthetic n-mer insert
AQWTLESGH

SEQ ID NO: 85 - protein, 9 aa, synthetic construct
  REGION 1..9: note = Synthetic n-mer insert
AQGENSARW

SEQ ID NO: 86 - protein, 9 aa, synthetic construct
  REGION 1..9: note = Synthetic n-mer insert
DGASNPGRW

SEQ ID NO: 87 - protein, 9 aa, synthetic construct
  REGION 1..9: note = Synthetic n-mer insert
AQLAVGQKW

SEQ ID NO: 88 - protein, 9 aa, synthetic construct
  REGION 1..9: note = Synthetic n-mer insert
AQVKLGYSQ

SEQ ID NO: 89 - protein, 9 aa, synthetic construct
  REGION 1..9: note = Synthetic n-mer insert
AQEAGSARW

SEQ ID NO: 90 - protein, 9 aa, synthetic construct
  REGION 1..9: note = Synthetic n-mer insert
AQLNYSVSL

SEQ ID NO: 91 - protein, 9 aa, synthetic construct
  REGION 1..9: note = Synthetic n-mer insert
AQWAISDGY

SEQ ID NO: 92 - protein, 9 aa, synthetic construct
  REGION 1..9: note = Synthetic n-mer insert
AQRGPGLSQ

SEQ ID NO: 93 - protein, 9 aa, synthetic construct
  REGION 1..9: note = Synthetic n-mer insert
DGWTLESGH

SEQ ID NO: 94 - protein, 9 aa, synthetic construct
  REGION 1..9: note = Synthetic n-mer insert
AQRYVGESS

SEQ ID NO: 95 - protein, 9 aa, synthetic construct
  REGION 1..9: note = Synthetic n-mer insert
DGREQKKLW

SEQ ID NO: 96 - protein, 9 aa, synthetic construct
  REGION 1..9: note = Synthetic n-mer insert
AQFTLTTPK

SEQ ID NO: 97 - protein, 9 aa, synthetic construct
  REGION 1..9: note = Synthetic n-mer insert
DGERLLVQL

SEQ ID NO: 98 - protein, 9 aa, synthetic construct
  REGION 1..9: note = Synthetic n-mer insert
AQEDLLRLR

SEQ ID NO: 99 - protein, 9 aa, synthetic construct
  REGION 1..9: note = Synthetic n-mer insert
AQPIIEHAV

SEQ ID NO: 100 - protein, 9 aa, synthetic construct
  REGION 1..9: note = Synthetic n-mer insert
DGRMQRTLY

SEQ ID NO: 101 - protein, 9 aa, synthetic construct
  REGION 1..9: note = Synthetic n-mer insert
DGWAISDGY

SEQ ID NO: 102 - protein, 9 aa, synthetic construct
  REGION 1..9: note = Synthetic n-mer insert
AQRYISDSA

SEQ ID NO: 103 - protein, 9 aa, synthetic construct
  REGION 1..9: note = Synthetic n-mer insert
AQWSTSSGF

SEQ ID NO: 104 - protein, 9 aa, synthetic construct
  REGION 1..9: note = Synthetic n-mer insert
AQWSLGSGH

SEQ ID NO: 105 - protein, 9 aa, synthetic construct
  REGION 1..9: note = Synthetic n-mer insert
AQWSQSSGY

SEQ ID NO: 106 - protein, 9 aa, synthetic construct
  REGION 1..9: note = Synthetic n-mer insert
DGVRGSSIL

SEQ ID NO: 107 - protein, 9 aa, synthetic construct
  REGION 1..9: note = Synthetic n-mer insert
AQIMLGYST

SEQ ID NO: 108 - protein, 9 aa, synthetic construct
  REGION 1..9: note = Synthetic n-mer insert
DGKLADSVP

SEQ ID NO: 109 - protein, 9 aa, synthetic construct
  REGION 1..9: note = Synthetic n-mer insert
AQASNPGRW

SEQ ID NO: 110 - protein, 9 aa, synthetic construct
  REGION 1..9: note = Synthetic n-mer insert
AQHVENWHI

SEQ ID NO: 111 - protein, 9 aa, synthetic construct
  REGION 1..9: note = Synthetic n-mer insert
AQVAGSSIL

SEQ ID NO: 112 - protein, 9 aa, synthetic construct
  REGION 1..9: note = Synthetic n-mer insert
DGRQQQKLW

SEQ ID NO: 113 - protein, 9 aa, synthetic construct
  REGION 1..9: note = Synthetic n-mer insert
DGTVNNDRF

SEQ ID NO: 114 - protein, 9 aa, synthetic construct
  REGION 1..9: note = Synthetic n-mer insert
DGMSANERT

SEQ ID NO: 115 - protein, 9 aa, synthetic construct
  REGION 1..9: note = Synthetic n-mer insert
AQATVAGQF

SEQ ID NO: 116 - protein, 9 aa, synthetic construct
  REGION 1..9: note = Synthetic n-mer insert
DGRDQQKLW

SEQ ID NO: 117 - protein, 9 aa, synthetic construct
  REGION 1..9: note = Synthetic n-mer insert
AQGKSPGVW

SEQ ID NO: 118 - protein, 9 aa, synthetic construct
  REGION 1..9: note = Synthetic n-mer insert
DGGASNGGT

SEQ ID NO: 119 - protein, 9 aa, synthetic construct
  REGION 1..9: note = Synthetic n-mer insert
AQSLVTSST

SEQ ID NO: 120 - protein, 9 aa, synthetic construct
  REGION 1..9: note = Synthetic n-mer insert
AQLLYGYSS

SEQ ID NO: 121 - protein, 9 aa, synthetic construct
  REGION 1..9: note = Synthetic n-mer insert
DGVTELTKF

SEQ ID NO: 122 - protein, 9 aa, synthetic construct
  REGION 1..9: note = Synthetic n-mer insert
AQALVQNGV

SEQ ID NO: 123 - protein, 9 aa, synthetic construct
  REGION 1..9: note = Synthetic n-mer insert
AQVLESNPR

SEQ ID NO: 124 - protein, 9 aa, synthetic construct
  REGION 1..9: note = Synthetic n-mer insert
AQPASHEVL

SEQ ID NO: 125 - protein, 9 aa, synthetic construct
  REGION 1..9: note = Synthetic n-mer insert
AQAGVQNAL

SEQ ID NO: 126 - protein, 9 aa, synthetic construct
  REGION 1..9: note = Synthetic n-mer insert
DGKEISVSV

SEQ ID NO: 127 - protein, 9 aa, synthetic construct
  REGION 1..9: note = Synthetic n-mer insert
AQGLNERVA

SEQ ID NO: 128 - protein, 9 aa, synthetic construct
  REGION 1..9: note = Synthetic n-mer insert
DGQVAQQGA

SEQ ID NO: 129 - protein, 9 aa, synthetic construct
  REGION 1..9: note = Synthetic n-mer insert
DGGVAGTNT

SEQ ID NO: 130 - protein, 9 aa, synthetic construct
  REGION 1..9: note = Synthetic n-mer insert
DGASAQGAL

SEQ ID NO: 131 - protein, 9 aa, synthetic construct
  REGION 1..9: note = Synthetic n-mer insert
AQAGVSSQT

SEQ ID NO: 132 - protein, 9 aa, synthetic construct
  REGION 1..9: note = Synthetic n-mer insert
AQKNRRHSV

SEQ ID NO: 133 - protein, 9 aa, synthetic construct
  REGION 1..9: note = Synthetic n-mer insert
AQKVDSAQL

SEQ ID NO: 134 - protein, 9 aa, synthetic construct
  REGION 1..9: note = Synthetic n-mer insert
AQYTLSQGW

SEQ ID NO: 135 - protein, 9 aa, synthetic construct
  REGION 1..9: note = Synthetic n-mer insert
DGQSVDRSK

SEQ ID NO: 136 - protein, 9 aa, synthetic construct
  REGION 1..9: note = Synthetic n-mer insert
AQASASSPR

SEQ ID NO: 137 - protein, 9 aa, synthetic construct
  REGION 1..9: note = Synthetic n-mer insert
DGRYVGESS

SEQ ID NO: 138 - protein, 9 aa, synthetic construct
  REGION 1..9: note = Synthetic n-mer insert
DGLGHNAGV

SEQ ID NO: 139 - protein, 9 aa, synthetic construct
  REGION 1..9: note = Synthetic n-mer insert
AQPNERINV

SEQ ID NO: 140 - protein, 9 aa, synthetic construct
  REGION 1..9: note = Synthetic n-mer insert
AQVMSGTSH

SEQ ID NO: 141 - protein, 9 aa, synthetic construct
  REGION 1..9: note = Synthetic n-mer insert
DGVLVSPGP

SEQ ID NO: 142 - protein, 9 aa, synthetic construct
  REGION 1..9: note = Synthetic n-mer insert
DGVGISSGV

SEQ ID NO: 143 - protein, 9 aa, synthetic construct
  REGION 1..9: note = Synthetic n-mer insert
DGSGETLRI

SEQ ID NO: 144 - protein, 9 aa, synthetic construct
  REGION 1..9: note = Synthetic n-mer insert
DGSTEGAAL

SEQ ID NO: 145 - protein, 9 aa, synthetic construct
  REGION 1..9: note = Synthetic n-mer insert
AQTSLSQDR

SEQ ID NO: 146 - protein, 9 aa, synthetic construct
  REGION 1..9: note = Synthetic n-mer insert
AQSANPVVT

SEQ ID NO: 147 - protein, 9 aa, synthetic construct
  REGION 1..9: note = Synthetic n-mer insert
DGVLASNGP

SEQ ID NO: 148 - protein, 9 aa, synthetic construct
  REGION 1..9: note = Synthetic n-mer insert
AQAHLDNAP

SEQ ID NO: 149 - protein, 9 aa, synthetic construct
  REGION 1..9: note = Synthetic n-mer insert
DGVVQVTGR

SEQ ID NO: 150 - protein, 9 aa, synthetic construct
  REGION 1..9: note = Synthetic n-mer insert
DGFAVRLSS

SEQ ID NO: 151 - protein, 9 aa, synthetic construct
  REGION 1..9: note = Synthetic n-mer insert
DGLVRDTKT

SEQ ID NO: 152 - protein, 9 aa, synthetic construct
  REGION 1..9: note = Synthetic n-mer insert
DGSGESLSR

SEQ ID NO: 153 - protein, 9 aa, synthetic construct
  REGION 1..9: note = Synthetic n-mer insert
AQTNEQAQR

SEQ ID NO: 154 - protein, 9 aa, synthetic construct
  REGION 1..9: note = Synthetic n-mer insert
DGTLANSQR

SEQ ID NO: 155 - protein, 9 aa, synthetic construct
  REGION 1..9: note = Synthetic n-mer insert
AQLLADKSV

SEQ ID NO: 156 - protein, 9 aa, synthetic construct
  REGION 1..9: note = Synthetic n-mer insert
DGSQEQRAR

SEQ ID NO: 157 - protein, 9 aa, synthetic construct
  REGION 1..9: note = Synthetic n-mer insert
AQVNGNTTY

SEQ ID NO: 158 - protein, 9 aa, synthetic construct
  REGION 1..9: note = Synthetic n-mer insert
AQALAEAGA

SEQ ID NO: 159 - protein, 9 aa, synthetic construct
  REGION 1..9: note = Synthetic n-mer insert
DGSREGGNV

SEQ ID NO: 160 - protein, 9 aa, synthetic construct
  REGION 1..9: note = Synthetic n-mer insert
AQMGDSVTI

SEQ ID NO: 161 - protein, 9 aa, synthetic construct
  REGION 1..9: note = Synthetic n-mer insert
DGLGGSSMG

SEQ ID NO: 162 - protein, 9 aa, synthetic construct
  REGION 1..9: note = Synthetic n-mer insert
AQGVRDTNI

SEQ ID NO: 163 - protein, 9 aa, synthetic construct
  REGION 1..9: note = Synthetic n-mer insert
DGSGSTDKL

SEQ ID NO: 164 - protein, 9 aa, synthetic construct
  REGION 1..9: note = Synthetic n-mer insert
AQASQNSTV

SEQ ID NO: 165 - protein, 9 aa, synthetic construct
  REGION 1..9: note = Synthetic n-mer insert
AQGGTSSGH

SEQ ID NO: 166 - protein, 9 aa, synthetic construct
  REGION 1..9: note = Synthetic n-mer insert
AQAADSSVR

SEQ ID NO: 167 - protein, 9 aa, synthetic construct
  REGION 1..9: note = Synthetic n-mer insert
AQAANSSVR

SEQ ID NO: 168 - protein, 9 aa, synthetic construct
  REGION 1..9: note = Synthetic n-mer insert
AQWADSKDQ

SEQ ID NO: 169 - protein, 9 aa, synthetic construct
  REGION 1..9: note = Synthetic n-mer insert
AQPTQGTVR

SEQ ID NO: 170 - protein, 9 aa, synthetic construct
  REGION 1..9: note = Synthetic n-mer insert
AQGSTDFKT

SEQ ID NO: 171 - protein, 9 aa, synthetic construct
  REGION 1..9: note = Synthetic n-mer insert
AQVDHGGVV

SEQ ID NO: 172 - protein, 9 aa, synthetic construct
  REGION 1..9: note = Synthetic n-mer insert
AQGEQQKGW

SEQ ID NO: 173 - protein, 9 aa, synthetic construct
  REGION 1..9: note = Synthetic n-mer insert
DGIANLAAS

SEQ ID NO: 174 - protein, 9 aa, synthetic construct
  REGION 1..9: note = Synthetic n-mer insert
DGAGGVRDR

SEQ ID NO: 175 - protein, 9 aa, synthetic construct
  REGION 1..9: note = Synthetic n-mer insert
DGGSGSGGL

SEQ ID NO: 176 - protein, 9 aa, synthetic construct
  REGION 1..9: note = Synthetic n-mer insert
DGTLANSER

SEQ ID NO: 177 - protein, 9 aa, synthetic construct
  REGION 1..9: note = Synthetic n-mer insert
AQKGASVTL

SEQ ID NO: 178 - protein, 9 aa, synthetic construct
  REGION 1..9: note = Synthetic n-mer insert
AQSNVALTG

SEQ ID NO: 179 - protein, 9 aa, synthetic construct
  REGION 1..9: note = Synthetic n-mer insert
DGVNYSVAL

SEQ ID NO: 180 - protein, 9 aa, synthetic construct
  REGION 1..9: note = Synthetic n-mer insert
AQGLNEHGA

SEQ ID NO: 181 - protein, 9 aa, synthetic construct
  REGION 1..9: note = Synthetic n-mer insert
DGKNPGVYT

SEQ ID NO: 182 - protein, 9 aa, synthetic construct
  REGION 1..9: note = Synthetic n-mer insert
DGQREAARI

SEQ ID NO: 183 - protein, 9 aa, synthetic construct
  REGION 1..9: note = Synthetic n-mer insert
AQGLVDSSR

SEQ ID NO: 184 - protein, 9 aa, synthetic construct
  REGION 1..9: note = Synthetic n-mer insert
DGNGSEGDR

SEQ ID NO: 185 - protein, 9 aa, synthetic construct
  REGION 1..9: note = Synthetic n-mer insert
DGNVGVVQL

SEQ ID NO: 186 - protein, 9 aa, synthetic construct
  REGION 1..9: note = Synthetic n-mer insert
AQVTDGVRS

SEQ ID NO: 187 - protein, 9 aa, synthetic construct
  REGION 1..9: note = Synthetic n-mer insert
AQVIASNEH

SEQ ID NO: 188 - protein, 9 aa, synthetic construct
  REGION 1..9: note = Synthetic n-mer insert
AQMSVGQSW

SEQ ID NO: 189 - protein, 9 aa, synthetic construct
  REGION 1..9: note = Synthetic n-mer insert
DGHSLQTSA

SEQ ID NO: 190 - protein, 9 aa, synthetic construct
  REGION 1..9: note = Synthetic n-mer insert
AQQDGYGTR

SEQ ID NO: 191 - protein, 9 aa, synthetic construct
  REGION 1..9: note = Synthetic n-mer insert
AQLSNGQGP

SEQ ID NO: 192 - protein, 9 aa, synthetic construct
  REGION 1..9: note = Synthetic n-mer insert
AQPVTDSKM

SEQ ID NO: 193 - protein, 9 aa, synthetic construct
  REGION 1..9: note = Synthetic n-mer insert
AQNGTAADR

SEQ ID NO: 194 - protein, 9 aa, synthetic construct
  REGION 1..9: note = Synthetic n-mer insert
AQIIVDNGS

SEQ ID NO: 195 - protein, 9 aa, synthetic construct
  REGION 1..9: note = Synthetic n-mer insert
AQEADNHGR

SEQ ID NO: 196 - protein, 9 aa, synthetic construct
  REGION 1..9: note = Synthetic n-mer insert
AQAADSSGR

SEQ ID NO: 197 - protein, 9 aa, synthetic construct
  REGION 1..9: note = Synthetic n-mer insert
AQVVDSNNL

SEQ ID NO: 198 - protein, 9 aa, synthetic construct
  REGION 1..9: note = Synthetic n-mer insert
DGSGANLSY

SEQ ID NO: 199 - protein, 9 aa, synthetic construct
  REGION 1..9: note = Synthetic n-mer insert
DGKAHDGEV

SEQ ID NO: 200 - protein, 7 aa, synthetic construct
  REGION 1..7: note = Synthetic n-mer insert
PSQGTLR

SEQ ID NO: 201 - protein, 21 aa, synthetic construct
  REGION 1..21: note = Synthetic encoding sequence
CCTTCTCAGGGGACGCTTCGG

SEQ ID NO: 202 - protein, 7 aa, synthetic construct
  REGION 1..7: note = Synthetic n-mer insert
TDALTTK

SEQ ID NO: 203 - protein, 21 aa, synthetic construct
  REGION 1..21: note = Synthetic encoding sequence
ACTGATGCGCTTACGACTAAG

SEQ ID NO: 204 - protein, 7 aa, synthetic construct
  REGION 1..7: note = Synthetic n-mer insert
PTQGTVR

SEQ ID NO: 205 - protein, 21 aa, synthetic construct
  REGION 1..21: note = Synthetic encoding sequence
CCCACACAAGGCACAGTCCGT

SEQ ID NO: 206 - protein, 7 aa, synthetic construct
  REGION 1..7: note = Synthetic n-mer insert
PTQGTLR

SEQ ID NO: 207 - protein, 21 aa, synthetic construct
  REGION 1..21: note = Synthetic encoding sequence
CCTACTCAGGGGACGCTTCGG

SEQ ID NO: 208 - protein, 7 aa, synthetic construct
  REGION 1..7: note = Synthetic n-mer insert
PTQGTVR

SEQ ID NO: 209 - protein, 21 aa, synthetic construct
  REGION 1..21: note = Synthetic encoding sequence
CCTACTCAGGGGACGGTTCGG

SEQ ID NO: 210 - protein, 7 aa, synthetic construct
  REGION 1..7: note = Synthetic n-mer insert
STIPTMK

SEQ ID NO: 211 - protein, 21 aa, synthetic construct
  REGION 1..21: note = Synthetic encoding sequence
AGTACTATTCCTACTATGAAG

SEQ ID NO: 212 - protein, 7 aa, synthetic construct
  REGION 1..7: note = Synthetic n-mer insert
TDAGDGK

SEQ ID NO: 213 - protein, 21 aa, synthetic construct
  REGION 1..21: note = Synthetic encoding sequence
ACAGACGCGGGGGACGGCAAA

SEQ ID NO: 214 - protein, 7 aa, synthetic construct
  REGION 1..7: note = Synthetic n-mer insert
YQRTESL

SEQ ID NO: 215 - protein, 21 aa, synthetic construct
  REGION 1..21: note = Synthetic encoding sequence
TATCAGAGGACGGAGTCTCTG

SEQ ID NO: 216 - protein, 7 aa, synthetic construct
  REGION 1..7: note = Synthetic n-mer insert
RVDPSGL

SEQ ID NO: 217 - protein, 21 aa, synthetic construct
  REGION 1..21: note = Synthetic encoding sequence
AGAGTCGACCCCAGTGGACTA

SEQ ID NO: 218 - protein, 7 aa, synthetic construct
  REGION 1..7: note = Synthetic n-mer insert
SLVTSST

SEQ ID NO: 219 - protein, 21 aa, synthetic construct
  REGION 1..21: note = Synthetic encoding sequence
TCGCTTGTTACTTCTAGTACG

SEQ ID NO: 220 - protein, 7 aa, synthetic construct
  REGION 1..7: note = Synthetic n-mer insert
LLAGADR

SEQ ID NO: 221 - protein, 21 aa, synthetic construct
  REGION 1..21: note = Synthetic encoding sequence
TTGCTTGCTGGTGCTGATCGT

SEQ ID NO: 222 - protein, 7 aa, synthetic construct
  REGION 1..7: note = Synthetic n-mer insert
STDRESR

SEQ ID NO: 223 - protein, 21 aa, synthetic construct
  REGION 1..21: note = Synthetic encoding sequence
TCCACGGACCGTGAAAGCCGA

SEQ ID NO: 224 - protein, 7 aa, synthetic construct
  REGION 1..7: note = Synthetic n-mer insert
NGYTEGR

SEQ ID NO: 225 - protein, 21 aa, synthetic construct
  REGION 1..21: note = Synthetic encoding sequence
AATGGGTATACGGAGGGGCGT

SEQ ID NO: 226 - protein, 7 aa, synthetic construct
  REGION 1..7: note = Synthetic n-mer insert
PTQGTFR

SEQ ID NO: 227 - protein, 21 aa, synthetic construct
  REGION 1..21: note = Synthetic encoding sequence
CCGACACAAGGAACATTCAGG

SEQ ID NO: 228 - protein, 7 aa, synthetic construct
  REGION 1..7: note = Synthetic n-mer insert
MTGISIV

SEQ ID NO: 229 - protein, 21 aa, synthetic construct
  REGION 1..21: note = Synthetic encoding sequence
ATGACAGGCATCTCTATCGTA

SEQ ID NO: 230 - protein, 7 aa, synthetic construct
  REGION 1..7: note = Synthetic n-mer insert
DGRAELR

SEQ ID NO: 231 - protein, 21 aa, synthetic construct
  REGION 1..21: note = Synthetic encoding sequence
GATGGGCGGGCGGAGTTGCGT

SEQ ID NO: 232 - protein, 7 aa, synthetic construct
  REGION 1..7: note = Synthetic n-mer insert
AADSSAR

SEQ ID NO: 233 - protein, 21 aa, synthetic construct
  REGION 1..21: note = Synthetic encoding sequence
GCCGCTGACTCATCGGCCCGT

SEQ ID NO: 234 - protein, 7 aa, synthetic construct
  REGION 1..7: note = Synthetic n-mer insert
PTQGTIR

SEQ ID NO: 235 - protein, 21 aa, synthetic construct
  REGION 1..21: note = Synthetic encoding sequence
CCTACTCAGGGGACGATTCGG

SEQ ID NO: 236 - protein, 7 aa, synthetic construct
  REGION 1..7: note = Synthetic n-mer insert
LSRGEEK

SEQ ID NO: 237 - protein, 21 aa, synthetic construct
  REGION 1..21: note = Synthetic encoding sequence
CTTTCGAGGGGTGAGGAGAAG

SEQ ID NO: 238 - protein, 7 aa, synthetic construct
  REGION 1..7: note = Synthetic n-mer insert
AIVSIAQ

SEQ ID NO: 239 - protein, 21 aa, synthetic construct
  REGION 1..21: note = Synthetic encoding sequence
GCGATTGTGTCGATTGCTCAG

SEQ ID NO: 240 - protein, 7 aa, synthetic construct
  REGION 1..7: note = Synthetic n-mer insert
LTSGLAA

SEQ ID NO: 241 - protein, 21 aa, synthetic construct
  REGION 1..21: note = Synthetic encoding sequence
TTGACGTCTGGTTTGGCGGCG

SEQ ID NO: 242 - protein, 7 aa, synthetic construct
  REGION 1..7: note = Synthetic n-mer insert
PTQGTFR

SEQ ID NO: 243 - protein, 21 aa, synthetic construct
  REGION 1..21: note = Synthetic encoding sequence
CCTACTCAGGGGACGTTTCGG

SEQ ID NO: 244 - protein, 7 aa, synthetic construct
  REGION 1..7: note = Synthetic n-mer insert
TLAISGR

SEQ ID NO: 245 - protein, 21 aa, synthetic construct
  REGION 1..21: note = Synthetic encoding sequence
ACTTTGGCGATTTCTGGGCGG

SEQ ID NO: 246 - protein, 7 aa, synthetic construct
  REGION 1..7: note = Synthetic n-mer insert
VHSQDVS

SEQ ID NO: 247 - protein, 21 aa, synthetic construct
  REGION 1..21: note = Synthetic encoding sequence
GTCCACAGTCAAGACGTTTCC

SEQ ID NO: 248 - protein, 7 aa, synthetic construct
  REGION 1..7: note = Synthetic n-mer insert
FQVEQVK

SEQ ID NO: 249 - protein, 21 aa, synthetic construct
  REGION 1..21: note = Synthetic encoding sequence
TTTCAGGTTGAGCAGGTTAAG

SEQ ID NO: 250 - protein, 7 aa, synthetic construct
  REGION 1..7: note = Synthetic n-mer insert
NRELALG

SEQ ID NO: 251 - protein, 21 aa, synthetic construct
  REGION 1..21: note = Synthetic encoding sequence
AACCGCGAACTCGCACTCGGG

SEQ ID NO: 252 - protein, 7 aa, synthetic construct
  REGION 1..7: note = Synthetic n-mer insert
SIGDLGK

SEQ ID NO: 253 - protein, 21 aa, synthetic construct
  REGION 1..21: note = Synthetic encoding sequence
AGTATCGGTGACCTAGGTAAA

SEQ ID NO: 254 - protein, 7 aa, synthetic construct
  REGION 1..7: note = Synthetic n-mer insert
TVGHDNK

SEQ ID NO: 255 - protein, 21 aa, synthetic construct
  REGION 1..21: note = Synthetic encoding sequence
ACCGTAGGACACGACAACAAA

SEQ ID NO: 256 - protein, 7 aa, synthetic construct
  REGION 1..7: note = Synthetic n-mer insert
HSKGFDY

SEQ ID NO: 257 - protein, 21 aa, synthetic construct
  REGION 1..21: note = Synthetic encoding sequence
CACAGTAAAGGTTTCGACTAC

SEQ ID NO: 258 - protein, 7 aa, synthetic construct
  REGION 1..7: note = Synthetic n-mer insert
HTQGTLR

SEQ ID NO: 259 - protein, 21 aa, synthetic construct
  REGION 1..21: note = Synthetic encoding sequence
CATACTCAGGGGACGCTTCGG

SEQ ID NO: 260 - protein, 7 aa, synthetic construct
  REGION 1..7: note = Synthetic n-mer insert
PAQGTLR

SEQ ID NO: 261 - protein, 21 aa, synthetic construct
  REGION 1..21: note = Synthetic encoding sequence
CCGGCGCAAGGAACACTACGA

SEQ ID NO: 262 - protein, 7 aa, synthetic construct
  REGION 1..7: note = Synthetic n-mer insert
AGGGDPR

SEQ ID NO: 263 - protein, 21 aa, synthetic construct
  REGION 1..21: note = Synthetic encoding sequence
GCTGGTGGAGGTGACCCCCGA

SEQ ID NO: 264 - protein, 7 aa, synthetic construct
  REGION 1..7: note = Synthetic n-mer insert
LGKADPV

SEQ ID NO: 265 - protein, 21 aa, synthetic construct
  REGION 1..21: note = Synthetic encoding sequence
TTGGGAAAAGCTGACCCAGTA

SEQ ID NO: 266 - protein, 7 aa, synthetic construct
  REGION 1..7: note = Synthetic n-mer insert
ALNEHVA

SEQ ID NO: 267 - protein, 21 aa, synthetic construct
  REGION 1..21: note = Synthetic encoding sequence
GCTCTGAATGAGCATGTGGCG

SEQ ID NO: 268 - protein, 7 aa, synthetic construct
  REGION 1..7: note = Synthetic n-mer insert
GSGGVSV

SEQ ID NO: 269 - protein, 21 aa, synthetic construct
  REGION 1..21: note = Synthetic encoding sequence
GGTTCGGGTGGTGTTAGTGTG

SEQ ID NO: 270 - protein, 7 aa, synthetic construct
  REGION 1..7: note = Synthetic n-mer insert
PSQGTLR

SEQ ID NO: 271 - protein, 21 aa, synthetic construct
  REGION 1..21: note = Synthetic encoding sequence
CCGTCCCAAGGAACACTCAGG

SEQ ID NO: 272 - protein, 7 aa, synthetic construct
  REGION 1..7: note = Synthetic n-mer insert
TGGRDQY

SEQ ID NO: 273 - protein, 21 aa, synthetic construct
  REGION 1..21: note = Synthetic encoding sequence
ACTGGTGGTCGGGATCAGTAT

SEQ ID NO: 274 - protein, 7 aa, synthetic construct
  REGION 1..7: note = Synthetic n-mer insert
YLVTTEN

SEQ ID NO: 275 - protein, 21 aa, synthetic construct
  REGION 1..21: note = Synthetic encoding sequence
TATTTGGTTACTACTGAGAAT

SEQ ID NO: 276 - protein, 7 aa, synthetic construct
  REGION 1..7: note = Synthetic n-mer insert
LSRDVAV

SEQ ID NO: 277 - protein, 21 aa, synthetic construct
  REGION 1..21: note = Synthetic encoding sequence
TTGTCGAGGGATGTGGCGGTT

SEQ ID NO: 278 - protein, 7 aa, synthetic construct
  REGION 1..7: note = Synthetic n-mer insert
RIVDSVP

SEQ ID NO: 279 - protein, 21 aa, synthetic construct
  REGION 1..21: note = Synthetic encoding sequence
AGGATTGTGGATAGTGTTCCG

SEQ ID NO: 280 - protein, 7 aa, synthetic construct
  REGION 1..7: note = Synthetic n-mer insert
KGYDTPM

SEQ ID NO: 281 - protein, 21 aa, synthetic construct
  REGION 1..21: note = Synthetic encoding sequence
AAAGGCTACGACACACCCATG

SEQ ID NO: 282 - protein, 7 aa, synthetic construct
  REGION 1..7: note = Synthetic n-mer insert
TSREEQW

SEQ ID NO: 283 - protein, 21 aa, synthetic construct
  REGION 1..21: note = Synthetic encoding sequence
ACTTCTCGTGAGGAGCAGTGG

SEQ ID NO: 284 - protein, 7 aa, synthetic construct
  REGION 1..7: note = Synthetic n-mer insert
RASADVV

SEQ ID NO: 285 - protein, 21 aa, synthetic construct
  REGION 1..21: note = Synthetic encoding sequence
AGGGCGAGTGCGGATGTTGTG

SEQ ID NO: 286 - protein, 7 aa, synthetic construct
  REGION 1..7: note = Synthetic n-mer insert
NLGAALS

SEQ ID NO: 287 - protein, 21 aa, synthetic construct
  REGION 1..21: note = Synthetic encoding sequence
AACCTTGGGGCTGCCCTATCG

SEQ ID NO: 288 - protein, 7 aa, synthetic construct
  REGION 1..7: note = Synthetic n-mer insert
SVTDIKH

SEQ ID NO: 289 - protein, 21 aa, synthetic construct
  REGION 1..21: note = Synthetic encoding sequence
TCGGTGACGGACATAAAACAC

SEQ ID NO: 290 - protein, 7 aa, synthetic construct
  REGION 1..7: note = Synthetic n-mer insert
FQDTIGV

SEQ ID NO: 291 - protein, 21 aa, synthetic construct
  REGION 1..21: note = Synthetic encoding sequence
TTTCAGGATACGATTGGGGTG

SEQ ID NO: 292 - protein, 7 aa, synthetic construct
  REGION 1..7: note = Synthetic n-mer insert
PNERLAV

SEQ ID NO: 293 - protein, 21 aa, synthetic construct
  REGION 1..21: note = Synthetic encoding sequence
CCTAACGAACGATTGGCAGTC

SEQ ID NO: 294 - protein, 7 aa, synthetic construct
  REGION 1..7: note = Synthetic n-mer insert
HTIAASM

SEQ ID NO: 295 - protein, 21 aa, synthetic construct
  REGION 1..21: note = Synthetic encoding sequence
CACACCATAGCCGCAAGTATG

SEQ ID NO: 296 - protein, 7 aa, synthetic construct
  REGION 1..7: note = Synthetic n-mer insert
NSDLMGR

SEQ ID NO: 297 - protein, 21 aa, synthetic construct
  REGION 1..21: note = Synthetic encoding sequence
AACAGTGACCTAATGGGCCGA

SEQ ID NO: 298 - protein, 7 aa, synthetic construct
  REGION 1..7: note = Synthetic n-mer insert
AGVSASL

SEQ ID NO: 299 - protein, 21 aa, synthetic construct
  REGION 1..21: note = Synthetic encoding sequence
GCGGGTGTTTCTGCGTCGTTG

SEQ ID NO: 300 - protein, 7 aa, synthetic construct
  REGION 1..7: note = Synthetic n-mer insert
PSQGTLR

SEQ ID NO: 301 - protein, 21 aa, synthetic construct
  REGION 1..21: note = Synthetic encoding sequence
CCTTCTCAGGGGACGCTTCGG

SEQ ID NO: 302 - protein, 21 aa, synthetic construct
  REGION 1..21: note = Synthetic encoding sequence
CCGTCCCAAGGAACACTCAGG

SEQ ID NO: 303 - protein, 7 aa, synthetic construct
  REGION 1..7: note = Synthetic n-mer insert
PTQGTVR

SEQ ID NO: 304 - protein, 21 aa, synthetic construct
  REGION 1..21: note = Synthetic encoding sequence
CCCACACAAGGCACAGTCCGT

SEQ ID NO: 305 - protein, 21 aa, synthetic construct
  REGION 1..21: note = Synthetic encoding sequence
CCTACTCAGGGGACGGTTCGG

SEQ ID NO: 306 - protein, 7 aa, synthetic construct
  REGION 1..7: note = Synthetic n-mer insert
PTQGTLR

SEQ ID NO: 307 - protein, 21 aa, synthetic construct
  REGION 1..21: note = Synthetic encoding sequence
CCTACTCAGGGGACGCTTCGG

SEQ ID NO: 308 - protein, 7 aa, synthetic construct
  REGION 1..7: note = Synthetic n-mer insert
PTQGTFR

SEQ ID NO: 309 - protein, 21 aa, synthetic construct
  REGION 1..21: note = Synthetic encoding sequence
CCGACACAAGGAACATTCAGG

SEQ ID NO: 310 - protein, 21 aa, synthetic construct
  REGION 1..21: note = Synthetic encoding sequence
CCTACTCAGGGGACGTTTCGG

SEQ ID NO: 311 - protein, 7 aa, synthetic construct
  REGION 1..7: note = Synthetic n-mer insert
PTQGTIR

SEQ ID NO: 312 - protein, 21 aa, synthetic construct
  REGION 1..21: note = Synthetic encoding sequence
CCTACTCAGGGGACGATTCGG

SEQ ID NO: 313 - protein, 7 aa, synthetic construct
  REGION 1..7: note = Synthetic n-mer insert
PAQGTLR

SEQ ID NO: 314 - protein, 21 aa, synthetic construct
  REGION 1..21: note = Synthetic encoding sequence
CCGGCGCAAGGAACACTACGA

SEQ ID NO: 315 - protein, 15 aa, synthetic construct
  REGION 1..15: note = Synthetic glycine linker
GGGGGGGGGGGGGGG

SEQ ID NO: 316 - protein, 15 aa, synthetic construct
  REGION 1..15: note = Synthetic glycine-serine linker
GGGGSGGGGSGGGGS

SEQ ID NO: 317 - protein, 7 aa, synthetic construct
  REGION 1..7: note = Synthetic n-mer insert
  SITE 2: note = misc_feature - Xaa can be any naturally occurring amino acid
  SITE 6: note = misc_feature - Xaa can be any naturally occurring amino acid
PXQGTXR

SEQ ID NO: 318 - protein, 7 aa, synthetic construct
  REGION 1..7: note = Synthetic n-mer insert
RSVGSVY

SEQ ID NO: 319 - protein, 7 aa, synthetic construct
  REGION 1..7: note = Synthetic n-mer insert
KTVGTVY

SEQ ID NO: 320 - protein, 7 aa, synthetic construct
  REGION 1..7: note = Synthetic n-mer insert
WVLPSGG

SEQ ID NO: 321 - protein, 7 aa, synthetic construct
  REGION 1..7: note = Synthetic n-mer insert
REQQKLW

SEQ ID NO: 322 - protein, 7 aa, synthetic construct
  REGION 1..7: note = Synthetic n-mer insert
PTQGTVR

SEQ ID NO: 323 - protein, 7 aa, synthetic construct
  REGION 1..7: note = Synthetic n-mer insert
PSQGTLR

SEQ ID NO: 324 - protein, 7 aa, synthetic construct
  REGION 1..7: note = Synthetic n-mer insert
PTQGTLR

SEQ ID NO: 325 - protein, 7 aa, synthetic construct
  REGION 1..7: note = Synthetic n-mer insert
RVDPSGL

SEQ ID NO: 326 - protein, 7 aa, synthetic construct
  REGION 1..7: note = Synthetic n-mer insert
VVSDYTV

SEQ ID NO: 327 - protein, 7 aa, synthetic construct
  REGION 1..7: note = Synthetic n-mer insert
TDALTTK

SEQ ID NO: 328 - protein, 7 aa, synthetic construct
  REGION 1..7: note = Synthetic n-mer insert
STIPTMK

SEQ ID NO: 329 - protein, 7 aa, synthetic construct
  REGION 1..7: note = Synthetic n-mer insert
PTQGTFR

SEQ ID NO: 330 - protein, 736 aa, synthetic construct
  REGION 1..736: note = Synthetic AAV9_G267A
MAADGYLPDWLEDNLSEGIREWWALKPGAPQPKANQQHQDNARGLVLPGYKVLGPGNGLDKGEPVNAADAAALEHDKAYDQQLKAGDNPYLKYNHADAEFQERLKEDTSFGGNLGRAVFQAKKRLLEPLGLVEEAAKTAPGKKRPVEQSPQEPDSSAGIGKSGAQPAKKRLNFGQTGDTESVPDPQPIGEPPAAPSGVGSLTMASGGGAPVADNNEGADGVGSSSGNWHCDSQWLGDRVITTSTRTWALPTYNNHLYKQISNSTSGASSNDNAYFGYSTPWGYFDFNRFHCHFSPRDWQRLINNNWGFRPKRLNFKLFNIQVKEVTDNNGVKTIANNLTSTVQVFTDSDYQLPYVLGSAHEGCLPPFPADVFMIPQYGYLTLNDGSQAVGRSSFYCLEYFPSQMLRTGNNFQFSYEFENVPFHSSYAHSQSLDRLMNPLIDQYLYYLSKTINGSGQNQQTLKFSVAGPSNMAVQGRNYIPGPSYRQQRVSTTVTQNNNSEFAWPGASSWALNGRNSLMNPGPAMASHKEGEDRFFPLSGSLIFGKQGTGRDNVDADKVMITNEEEIKTTNPVATESYGQVATNHQSAQAQAQTGWVQNQGILPGMVWQDRDVYLQGPIWAKIPHTDGNFHPSPLMGGFGMKHPPPQILIKNTPVPADPPTAFNKDKLNSFITQYSTGQVSVEIEWELQKENSKRWNPEIQYTSNYYKSNNVEFAVNTEGVYSEPRPIGTRYLTRNL

SEQ ID NO: 331 - protein, 736 aa, synthetic construct
  REGION 1..736: note = Synthetic AAV9_G267A, S269T
MAADGYLPDWLEDNLSEGIREWWALKPGAPQPKANQQHQDNARGLVLPGYKVLGPGNGLDKGEPVNAADAAALEHDKAYDQQLKAGDNPYLKYNHADAEFQERLKEDTSFGGNLGRAVFQAKKRLLEPLGLVEEAAKTAPGKKRPVEQSPQEPDSSAGIGKSGAQPAKKRLNFGQTGDTESVPDPQPIGEPPAAPSGVGSLTMASGGGAPVADNNEGADGVGSSSGNWHCDSQWLGDRVITTSTRTWALPTYNNHLYKQISNSTSGASTNDNAYFGYSTPWGYFDFNRFHCHFSPRDWQRLINNNWGFRPKRLNFKLFNIQVKEVTDNNGVKTIANNLTSTVQVFTDSDYQLPYVLGSAHEGCLPPFPADVFMIPQYGYLTLNDGSQAVGRSSFYCLEYFPSQMLRTGNNFQFSYEFENVPFHSSYAHSQSLDRLMNPLIDQYLYYLSKTINGSGQNQQTLKFSVAGPSNMAVQGRNYIPGPSYRQQRVSTTVTQNNNSEFAWPGASSWALNGRNSLMNPGPAMASHKEGEDRFFPLSGSLIFGKQGTGRDNVDADKVMITNEEEIKTTNPVATESYGQVATNHQSAQAQAQTGWVQNQGILPGMVWQDRDVYLQGPIWAKIPHTDGNFHPSPLMGGFGMKHPPPQILIKNTPVPADPPTAFNKDKLNSFITQYSTGQVSVEIEWELQKENSKRWNPEIQYTSNYYKSNNVEFAVNTEGVYSEPRPIGTRYLTRNL

SEQ ID NO: 332 - protein, 10 aa, synthetic construct
  REGION 1..10: note = Synthetic n-mer insert
EVGPTQGTVR

SEQ ID NO: 333 - protein, 10 aa, synthetic construct
  REGION 1..10: note = Synthetic n-mer insert
DYEPSQGTMR

SEQ ID NO: 334 - protein, 10 aa, synthetic construct
  REGION 1..10: note = Synthetic n-mer insert
SVSPGQGTYR

SEQ ID NO: 335 - protein, 10 aa, synthetic construct
  REGION 1..10: note = Synthetic n-mer insert
AVTPIQGTIR

SEQ ID NO: 336 - protein, 10 aa, synthetic construct
  REGION 1..10: note = Synthetic n-mer insert
ENVPMQGTVR

SEQ ID NO: 337 - protein, 10 aa, synthetic construct
  REGION 1..10: note = Synthetic n-mer insert
AASPPQGTMR

SEQ ID NO: 338 - protein, 10 aa, synthetic construct
  REGION 1..10: note = Synthetic n-mer insert
DQRPGQGTIR

SEQ ID NO: 339 - protein, 10 aa, synthetic construct
  REGION 1..10: note = Synthetic n-mer insert
NVSPQQGTMR

SEQ ID NO: 340 - protein, 10 aa, synthetic construct
  REGION 1..10: note = Synthetic n-mer insert
IPIPNQGTIR

SEQ ID NO: 341 - protein, 10 aa, synthetic construct
  REGION 1..10: note = Synthetic n-mer insert
STVPAQGTMR

SEQ ID NO: 342 - protein, 10 aa, synthetic construct
  REGION 1..10: note = Synthetic n-mer insert
STVPSQGTVR

SEQ ID NO: 343 - protein, 10 aa, synthetic construct
  REGION 1..10: note = Synthetic n-mer insert
SPIPSQGTLR

SEQ ID NO: 344 - protein, 10 aa, synthetic construct
  REGION 1..10: note = Synthetic n-mer insert
TTMPSQGTIR

SEQ ID NO: 345 - protein, 10 aa, synthetic construct
  REGION 1..10: note = Synthetic n-mer insert
SVMPAQGTLR

SEQ ID NO: 346 - protein, 10 aa, synthetic construct
  REGION 1..10: note = Synthetic n-mer insert
SIVPVQGTVR

SEQ ID NO: 347 - protein, 10 aa, synthetic construct
  REGION 1..10: note = Synthetic n-mer insert
SVTPSQGTLR

SEQ ID NO: 348 - protein, 10 aa, synthetic construct
  REGION 1..10: note = Synthetic n-mer insert
AVGPSQGTIR

SEQ ID NO: 349 - protein, 10 aa, synthetic construct
  REGION 1..10: note = Synthetic n-mer insert
SINPSQGTIR

SEQ ID NO: 350 - protein, 10 aa, synthetic construct
  REGION 1..10: note = Synthetic n-mer insert
AINPTQGTLR

SEQ ID NO: 351 - protein, 10 aa, synthetic construct
  REGION 1..10: note = Synthetic n-mer insert
ALLPNQGTVR

SEQ ID NO: 352 - protein, 10 aa, synthetic construct
  REGION 1..10: note = Synthetic n-mer insert
ASMPQQGTIR

SEQ ID NO: 353 - protein, 10 aa, synthetic construct
  REGION 1..10: note = Synthetic n-mer insert
SNAPAQGTMR

SEQ ID NO: 354 - protein, 10 aa, synthetic construct
  REGION 1..10: note = Synthetic n-mer insert
LNVPVQGTVR

SEQ ID NO: 355 - protein, 10 aa, synthetic construct
  REGION 1..10: note = Synthetic n-mer insert
QVTPTQGTVR

SEQ ID NO: 356 - protein, 10 aa, synthetic construct
  REGION 1..10: note = Synthetic n-mer insert
LVSPAQGTMR

SEQ ID NO: 357 - protein, 10 aa, synthetic construct
  REGION 1..10: note = Synthetic n-mer insert
AVTPSQGTIR

SEQ ID NO: 358 - protein, 10 aa, synthetic construct
  REGION 1..10: note = Synthetic n-mer insert
VAGPSQGTLR

SEQ ID NO: 359 - protein, 10 aa, synthetic construct
  REGION 1..10: note = Synthetic n-mer insert
EKLPSQGTLR

SEQ ID NO: 360 - protein, 10 aa, synthetic construct
  REGION 1..10: note = Synthetic n-mer insert
SISPLQGTVR

SEQ ID NO: 361 - protein, 10 aa, synthetic construct
  REGION 1..10: note = Synthetic n-mer insert
ESRPLQGTYR

SEQ ID NO: 362 - protein, 10 aa, synthetic construct
  REGION 1..10: note = Synthetic n-mer insert
NANPGQGTVR

SEQ ID NO: 363 - protein, 10 aa, synthetic construct
  REGION 1..10: note = Synthetic n-mer insert
IPLPSQGTVR

SEQ ID NO: 364 - protein, 10 aa, synthetic construct
  REGION 1..10: note = Synthetic n-mer insert
MPMPNQGTVR

SEQ ID NO: 365 - protein, 10 aa, synthetic construct
  REGION 1..10: note = Synthetic n-mer insert
ETRPDQGTVR

SEQ ID NO: 366 - protein, 10 aa, synthetic construct
  REGION 1..10: note = Synthetic n-mer insert
TEKPMQGTER

SEQ ID NO: 367 - protein, 10 aa, synthetic construct
  REGION 1..10: note = Synthetic n-mer insert
GDDPLQGTSR

SEQ ID NO: 368 - protein, 10 aa, synthetic construct
  REGION 1..10: note = Synthetic n-mer insert
SISPGQGTLR

SEQ ID NO: 369 - protein, 10 aa, synthetic construct
  REGION 1..10: note = Synthetic n-mer insert
EMNPLQGTVR

SEQ ID NO: 370 - protein, 10 aa, synthetic construct
  REGION 1..10: note = Synthetic n-mer insert
SAEPGQGTTR

SEQ ID NO: 371 - protein, 10 aa, synthetic construct
  REGION 1..10: note = Synthetic n-mer insert
MNVPSQGTDR

SEQ ID NO: 372 - protein, 10 aa, synthetic construct
  REGION 1..10: note = Synthetic n-mer insert
ITSPTQGTNR

SEQ ID NO: 373 - protein, 10 aa, synthetic construct
  REGION 1..10: note = Synthetic n-mer insert
MLEPTQGTPR

SEQ ID NO: 374 - protein, 10 aa, synthetic construct
  REGION 1..10: note = Synthetic n-mer insert
LEPPTQGTGR

SEQ ID NO: 375 - protein, 10 aa, synthetic construct
  REGION 1..10: note = Synthetic n-mer insert
QNEPRQGTDR

SEQ ID NO: 376 - protein, 10 aa, synthetic construct
  REGION 1..10: note = Synthetic n-mer insert
SMTPVQGTVR

SEQ ID NO: 377 - protein, 10 aa, synthetic construct
  REGION 1..10: note = Synthetic n-mer insert
SRAPDQGTIR

SEQ ID NO: 378 - protein, 10 aa, synthetic construct
  REGION 1..10: note = Synthetic n-mer insert
NTQPIQGTTR

SEQ ID NO: 379 - protein, 10 aa, synthetic construct
  REGION 1..10: note = Synthetic n-mer insert
LSVPLQGTIR

SEQ ID NO: 380 - protein, 10 aa, synthetic construct
  REGION 1..10: note = Synthetic n-mer insert
SEAPGQGTVR

SEQ ID NO: 381 - protein, 10 aa, synthetic construct
  REGION 1..10: note = Synthetic n-mer insert
GREPGQGTYR

SEQ ID NO: 382 - protein, 10 aa, synthetic construct
  REGION 1..10: note = Synthetic n-mer insert
IASPVQGTPR

SEQ ID NO: 383 - protein, 10 aa, synthetic construct
  REGION 1..10: note = Synthetic n-mer insert
SAIPPQGTSR

SEQ ID NO: 384 - protein, 10 aa, synthetic construct
  REGION 1..10: note = Synthetic n-mer insert
GMLPEQGTPR

SEQ ID NO: 385 - protein, 10 aa, synthetic construct
  REGION 1..10: note = Synthetic n-mer insert
WDDPHQGTMR

SEQ ID NO: 386 - protein, 10 aa, synthetic construct
  REGION 1..10: note = Synthetic n-mer insert
AIGPGQGTMR

SEQ ID NO: 387 - protein, 10 aa, synthetic construct
  REGION 1..10: note = Synthetic n-mer insert
ASVPQQGTVR

SEQ ID NO: 388 - protein, 10 aa, synthetic construct
  REGION 1..10: note = Synthetic n-mer insert
SVQPGQGTYR

SEQ ID NO: 389 - protein, 10 aa, synthetic construct
  REGION 1..10: note = Synthetic n-mer insert
NAGPSQGTLR

SEQ ID NO: 390 - protein, 10 aa, synthetic construct
  REGION 1..10: note = Synthetic n-mer insert
MKVPEQGTMR

SEQ ID NO: 391 - protein, 10 aa, synthetic construct
  REGION 1..10: note = Synthetic n-mer insert
TTIPEQGTYR

SEQ ID NO: 392 - protein, 10 aa, synthetic construct
  REGION 1..10: note = Synthetic n-mer insert
SAIPGQGTTR

SEQ ID NO: 393 - protein, 10 aa, synthetic construct
  REGION 1..10: note = Synthetic n-mer insert
DNGPRQGTLR

SEQ ID NO: 394 - protein, 10 aa, synthetic construct
  REGION 1..10: note = Synthetic n-mer insert
TLPPVQGTMR

SEQ ID NO: 395 - protein, 10 aa, synthetic construct
  REGION 1..10: note = Synthetic n-mer insert
NTSPMQGTQR

SEQ ID NO: 396 - protein, 10 aa, synthetic construct
  REGION 1..10: note = Synthetic n-mer insert
ETSPSQGTYR

SEQ ID NO: 397 - protein, 10 aa, synthetic construct
  REGION 1..10: note = Synthetic n-mer insert
SATPAQGTVR

SEQ ID NO: 398 - protein, 10 aa, synthetic construct
  REGION 1..10: note = Synthetic n-mer insert
MATPMQGTFR

SEQ ID NO: 399 - protein, 10 aa, synthetic construct
  REGION 1..10: note = Synthetic n-mer insert
MNVPTQGTVR

SEQ ID NO: 400 - protein, 10 aa, synthetic construct
  REGION 1..10: note = Synthetic n-mer insert
SVLPEQGTMR

SEQ ID NO: 401 - protein, 10 aa, synthetic construct
  REGION 1..10: note = Synthetic n-mer insert
STTPIQGTMR

SEQ ID NO: 402 - protein, 10 aa, synthetic construct
  REGION 1..10: note = Synthetic n-mer insert
NSDPQQGTVR

SEQ ID NO: 403 - protein, 10 aa, synthetic construct
  REGION 1..10: note = Synthetic n-mer insert
SNTPLQGTTR

SEQ ID NO: 404 - protein, 10 aa, synthetic construct
  REGION 1..10: note = Synthetic n-mer insert
SDAPQQGTLR

SEQ ID NO: 405 - protein, 10 aa, synthetic construct
  REGION 1..10: note = Synthetic n-mer insert
SNAPIQGTMR

SEQ ID NO: 406 - protein, 10 aa, synthetic construct
  REGION 1..10: note = Synthetic n-mer insert
NANPGQGTMR

SEQ ID NO: 407 - protein, 10 aa, synthetic construct
  REGION 1..10: note = Synthetic n-mer insert
ESMPVQGTHR

SEQ ID NO: 408 - protein, 10 aa, synthetic construct
  REGION 1..10: note = Synthetic n-mer insert
VERPLQGTMR

SEQ ID NO: 409 - protein, 10 aa, synthetic construct
  REGION 1..10: note = Synthetic n-mer insert
SVSPTQGTMR

SEQ ID NO: 410 - protein, 10 aa, synthetic construct
  REGION 1..10: note = Synthetic n-mer insert
VVAPLQGTDR

SEQ ID NO: 411 - protein, 10 aa, synthetic construct
  REGION 1..10: note = Synthetic n-mer insert
SVTPLQGTIR

SEQ ID NO: 412 - protein, 10 aa, synthetic construct
  REGION 1..10: note = Synthetic n-mer insert
VPNPVQGTPR

SEQ ID NO: 413 - protein, 10 aa, synthetic construct
  REGION 1..10: note = Synthetic n-mer insert
GIWPGQGTGR

SEQ ID NO: 414 - protein, 10 aa, synthetic construct
  REGION 1..10: note = Synthetic n-mer insert
LPTPIQGTLR

SEQ ID NO: 415 - protein, 10 aa, synthetic construct
  REGION 1..10: note = Synthetic n-mer insert
ANEPRQGTVR

SEQ ID NO: 416 - protein, 10 aa, synthetic construct
  REGION 1..10: note = Synthetic n-mer insert
TAFPTQGTMR

SEQ ID NO: 417 - protein, 10 aa, synthetic construct
  REGION 1..10: note = Synthetic n-mer insert
SSAPNQGTMR

SEQ ID NO: 418 - protein, 10 aa, synthetic construct
  REGION 1..10: note = Synthetic n-mer insert
MESPVQGTTR

SEQ ID NO: 419 - protein, 10 aa, synthetic construct
  REGION 1..10: note = Synthetic n-mer insert
CTAPGQGTDR

SEQ ID NO: 420 - protein, 10 aa, synthetic construct
  REGION 1..10: note = Synthetic n-mer insert
VTNPTQGTYR

SEQ ID NO: 421 - protein, 10 aa, synthetic construct
  REGION 1..10: note = Synthetic n-mer insert
SNAPIQGTFR

SEQ ID NO: 422 - protein, 10 aa, synthetic construct
  REGION 1..10: note = Synthetic n-mer insert
QSTPGQGTLR

SEQ ID NO: 423 - protein, 10 aa, synthetic construct
  REGION 1..10: note = Synthetic n-mer insert
LVKPPQGTDR

SEQ ID NO: 424 - protein, 10 aa, synthetic construct
  REGION 1..10: note = Synthetic n-mer insert
AAGPMQGTNR

SEQ ID NO: 425 - protein, 10 aa, synthetic construct
  REGION 1..10: note = Synthetic n-mer insert
SSSPNQGTFR

SEQ ID NO: 426 - protein, 10 aa, synthetic construct
  REGION 1..10: note = Synthetic n-mer insert
QESPLQGTVR

SEQ ID NO: 427 - protein, 10 aa, synthetic construct
  REGION 1..10: note = Synthetic n-mer insert
AASPTQGTLR

SEQ ID NO: 428 - protein, 10 aa, synthetic construct
  REGION 1..10: note = Synthetic n-mer insert
FTAPDQGTGR

SEQ ID NO: 429 - protein, 10 aa, synthetic construct
  REGION 1..10: note = Synthetic n-mer insert
DNVPNQGTIR

SEQ ID NO: 430 - protein, 10 aa, synthetic construct
  REGION 1..10: note = Synthetic n-mer insert
YSMPTQGTVR

SEQ ID NO: 431 - protein, 10 aa, synthetic construct
  REGION 1..10: note = Synthetic n-mer insert
SSIPGQGTAR

SEQ ID NO: 432 - protein, 10 aa, synthetic construct
  REGION 1..10: note = Synthetic n-mer insert
VTIPAQGTIR

SEQ ID NO: 433 - protein, 10 aa, synthetic construct
  REGION 1..10: note = Synthetic n-mer insert
AHMPSQGTDR

SEQ ID NO: 434 - protein, 10 aa, synthetic construct
  REGION 1..10: note = Synthetic n-mer insert
YVTPPQGTLR

SEQ ID NO: 435 - protein, 10 aa, synthetic construct
  REGION 1..10: note = Synthetic n-mer insert
DGNPAQGTGR

SEQ ID NO: 436 - protein, 10 aa, synthetic construct
  REGION 1..10: note = Synthetic n-mer insert
LQNPSQGTSR

SEQ ID NO: 437 - protein, 10 aa, synthetic construct
  REGION 1..10: note = Synthetic n-mer insert
LQGPVQGTLR

SEQ ID NO: 438 - protein, 10 aa, synthetic construct
  REGION 1..10: note = Synthetic n-mer insert
STNPAQGTLR

SEQ ID NO: 439 - protein, 10 aa, synthetic construct
  REGION 1..10: note = Synthetic n-mer insert
LPTPIQGTMR

SEQ ID NO: 440 - protein, 10 aa, synthetic construct
  REGION 1..10: note = Synthetic n-mer insert
SVAPTQGTVR

SEQ ID NO: 441 - protein, 10 aa, synthetic construct
  REGION 1..10: note = Synthetic n-mer insert
QPSPMQGTVR

SEQ ID NO: 442 - protein, 10 aa, synthetic construct
  REGION 1..10: note = Synthetic n-mer insert
MTQPSQGTIR

SEQ ID NO: 443 - protein, 10 aa, synthetic construct
  REGION 1..10: note = Synthetic n-mer insert
SAEPNQGTTR

SEQ ID NO: 444 - protein, 10 aa, synthetic construct
  REGION 1..10: note = Synthetic n-mer insert
TDTPSQGTVR

SEQ ID NO: 445 - protein, 10 aa, synthetic construct
  REGION 1..10: note = Synthetic n-mer insert
LQQPLQGTTR

SEQ ID NO: 446 - protein, 10 aa, synthetic construct
  REGION 1..10: note = Synthetic n-mer insert
NTHPAQGTVR

SEQ ID NO: 447 - protein, 10 aa, synthetic construct
  REGION 1..10: note = Synthetic n-mer insert
VSAPMQGTMR

SEQ ID NO: 448 - protein, 10 aa, synthetic construct
  REGION 1..10: note = Synthetic n-mer insert
SEKPAQGTYR

SEQ ID NO: 449 - protein, 10 aa, synthetic construct
  REGION 1..10: note = Synthetic n-mer insert
TSLPTQGTLR

SEQ ID NO: 450 - protein, 10 aa, synthetic construct
  REGION 1..10: note = Synthetic n-mer insert
SERPVQGTFR

SEQ ID NO: 451 - protein, 10 aa, synthetic construct
  REGION 1..10: note = Synthetic n-mer insert
VLEPSQGTSR

SEQ ID NO: 452 - protein, 10 aa, synthetic construct
  REGION 1..10: note = Synthetic n-mer insert
ANAPIQGTIR

SEQ ID NO: 453 - protein, 10 aa, synthetic construct
  REGION 1..10: note = Synthetic n-mer insert
NVSPIQGTMR

SEQ ID NO: 454 - protein, 10 aa, synthetic construct
  REGION 1..10: note = Synthetic n-mer insert
SVLPEQGTMR

SEQ ID NO: 455 - protein, 10 aa, synthetic construct
  REGION 1..10: note = Synthetic n-mer insert
NDRPLQGTMR

SEQ ID NO: 456 - protein, 10 aa, synthetic construct
  REGION 1..10: note = Synthetic n-mer insert
VVPPGQGTLR

SEQ ID NO: 457 - protein, 10 aa, synthetic construct
  REGION 1..10: note = Synthetic n-mer insert
EPSPNQGTSR

SEQ ID NO: 458 - protein, 10 aa, synthetic construct
  REGION 1..10: note = Synthetic n-mer insert
VLLPSQGTVR

SEQ ID NO: 459 - protein, 10 aa, synthetic construct
  REGION 1..10: note = Synthetic n-mer insert
GSFPQQGTLR

SEQ ID NO: 460 - protein, 10 aa, synthetic construct
  REGION 1..10: note = Synthetic n-mer insert
NTIPVQGTQR

SEQ ID NO: 461 - protein, 10 aa, synthetic construct
  REGION 1..10: note = Synthetic n-mer insert
AASPPQGTLR

SEQ ID NO: 462 - protein, 10 aa, synthetic construct
  REGION 1..10: note = Synthetic n-mer insert
TAVPSQGTHR

SEQ ID NO: 463 - protein, 10 aa, synthetic construct
  REGION 1..10: note = Synthetic n-mer insert
YESPVQGTVR

SEQ ID NO: 464 - protein, 10 aa, synthetic construct
  REGION 1..10: note = Synthetic n-mer insert
AALPSQGTLR

SEQ ID NO: 465 - protein, 10 aa, synthetic construct
  REGION 1..10: note = Synthetic n-mer insert
SRIPDQGTIR

SEQ ID NO: 466 - protein, 10 aa, synthetic construct
  REGION 1..10: note = Synthetic n-mer insert
MPRPDQGTMR

SEQ ID NO: 467 - protein, 10 aa, synthetic construct
  REGION 1..10: note = Synthetic n-mer insert
ISTPTQGTLR

SEQ ID NO: 468 - protein, 10 aa, synthetic construct
  REGION 1..10: note = Synthetic n-mer insert
VDIPMQGTLR

SEQ ID NO: 469 - protein, 10 aa, synthetic construct
  REGION 1..10: note = Synthetic n-mer insert
NMLPTQGTIR

SEQ ID NO: 470 - protein, 10 aa, synthetic construct
  REGION 1..10: note = Synthetic n-mer insert
TVLPGQGTIR

SEQ ID NO: 471 - protein, 10 aa, synthetic construct
  REGION 1..10: note = Synthetic n-mer insert
TTDPVQGTVR

SEQ ID NO: 472 - protein, 10 aa, synthetic construct
  REGION 1..10: note = Synthetic n-mer insert
SVTPVQGTSR

SEQ ID NO: 473 - protein, 10 aa, synthetic construct
  REGION 1..10: note = Synthetic n-mer insert
FPLPSQGTVR

SEQ ID NO: 474 - protein, 10 aa, synthetic construct
  REGION 1..10: note = Synthetic n-mer insert
EMAPNQGTSR

SEQ ID NO: 475 - protein, 10 aa, synthetic construct
  REGION 1..10: note = Synthetic n-mer insert
VDRPSQGTMR

SEQ ID NO: 476 - protein, 10 aa, synthetic construct
  REGION 1..10: note = Synthetic n-mer insert
NTEPPQGTDR

SEQ ID NO: 477 - protein, 10 aa, synthetic construct
  REGION 1..10: note = Synthetic n-mer insert
MAMPPQGTLR

SEQ ID NO: 478 - protein, 10 aa, synthetic construct
  REGION 1..10: note = Synthetic n-mer insert
ATLPSQGTLR

SEQ ID NO: 479 - protein, 10 aa, synthetic construct
  REGION 1..10: note = Synthetic n-mer insert
LAIPPQGTSR

SEQ ID NO: 480 - protein, 10 aa, synthetic construct
  REGION 1..10: note = Synthetic n-mer insert
TSGPVQGTFR

SEQ ID NO: 481 - protein, 10 aa, synthetic construct
  REGION 1..10: note = Synthetic n-mer insert
SSGPGQGTDR

SEQ ID NO: 482 - protein, 10 aa, synthetic construct
  REGION 1..10: note = Synthetic n-mer insert
MVTPGQGTMR

SEQ ID NO: 483 - protein, 10 aa, synthetic construct
  REGION 1..10: note = Synthetic n-mer insert
EGTPVQGTTR

SEQ ID NO: 484 - protein, 10 aa, synthetic construct
  REGION 1..10: note = Synthetic n-mer insert
MPIPSQGTPR

SEQ ID NO: 485 - protein, 10 aa, synthetic construct
  REGION 1..10: note = Synthetic n-mer insert
NPLPTQGTSR

SEQ ID NO: 486 - protein, 10 aa, synthetic construct
  REGION 1..10: note = Synthetic n-mer insert
SHFPPQGTNR

SEQ ID NO: 487 - protein, 10 aa, synthetic construct
  REGION 1..10: note = Synthetic n-mer insert
AVTPTQGTIR

SEQ ID NO: 488 - protein, 10 aa, synthetic construct
  REGION 1..10: note = Synthetic n-mer insert
ESGPSQGTSR

SEQ ID NO: 489 - protein, 10 aa, synthetic construct
  REGION 1..10: note = Synthetic n-mer insert
MTVPSQGTFR

SEQ ID NO: 490 - protein, 10 aa, synthetic construct
  REGION 1..10: note = Synthetic n-mer insert
EAYPTQGTIR

SEQ ID NO: 491 - protein, 10 aa, synthetic construct
  REGION 1..10: note = Synthetic n-mer insert
SSTPAQGTFR

SEQ ID NO: 492 - protein, 10 aa, synthetic construct
  REGION 1..10: note = Synthetic n-mer insert
DSRPLQGTIR

SEQ ID NO: 493 - protein, 10 aa, synthetic construct
  REGION 1..10: note = Synthetic n-mer insert
DNAPLQGTNR

SEQ ID NO: 494 - protein, 10 aa, synthetic construct
  REGION 1..10: note = Synthetic n-mer insert
QPIPPQGTMR

SEQ ID NO: 495 - protein, 10 aa, synthetic construct
  REGION 1..10: note = Synthetic n-mer insert
ASSPTQGTER

SEQ ID NO: 496 - protein, 10 aa, synthetic construct
  REGION 1..10: note = Synthetic n-mer insert
NVSPSQGTVR

SEQ ID NO: 497 - protein, 10 aa, synthetic construct
  REGION 1..10: note = Synthetic n-mer insert
IHLPAQGTVR

SEQ ID NO: 498 - protein, 10 aa, synthetic construct
  REGION 1..10: note = Synthetic n-mer insert
SSVPAQGTQR

SEQ ID NO: 499 - protein, 10 aa, synthetic construct
  REGION 1..10: note = Synthetic n-mer insert
TTGPNQGTLR

SEQ ID NO: 500 - protein, 10 aa, synthetic construct
  REGION 1..10: note = Synthetic n-mer insert
ATGPTQGTLR

SEQ ID NO: 501 - protein, 10 aa, synthetic construct
  REGION 1..10: note = Synthetic n-mer insert
AATPGQGTYR

SEQ ID NO: 502 - protein, 10 aa, synthetic construct
  REGION 1..10: note = Synthetic n-mer insert
AAVPTQGTVR

SEQ ID NO: 503 - protein, 10 aa, synthetic construct
  REGION 1..10: note = Synthetic n-mer insert
EGKPEQGTTR

SEQ ID NO: 504 - protein, 10 aa, synthetic construct
  REGION 1..10: note = Synthetic n-mer insert
SIAPTQGTIR

SEQ ID NO: 505 - protein, 10 aa, synthetic construct
  REGION 1..10: note = Synthetic n-mer insert
DVRPSQGTIR

SEQ ID NO: 506 - protein, 10 aa, synthetic construct
  REGION 1..10: note = Synthetic n-mer insert
MLRPEQGTDR

SEQ ID NO: 507 - protein, 10 aa, synthetic construct
  REGION 1..10: note = Synthetic n-mer insert
TVSPTQGTTR

SEQ ID NO: 508 - protein, 10 aa, synthetic construct
  REGION 1..10: note = Synthetic n-mer insert
KERPEQGTMR

SEQ ID NO: 509 - protein, 10 aa, synthetic construct
  REGION 1..10: note = Synthetic n-mer insert
DSSPNQGTYR

SEQ ID NO: 510 - protein, 10 aa, synthetic construct
  REGION 1..10: note = Synthetic n-mer insert
SLAPMQGTTR

SEQ ID NO: 511 - protein, 10 aa, synthetic construct
  REGION 1..10: note = Synthetic n-mer insert
ELHPTQGTSR

SEQ ID NO: 512 - protein, 10 aa, synthetic construct
  REGION 1..10: note = Synthetic n-mer insert
ETGPMQGTVR

SEQ ID NO: 513 - protein, 10 aa, synthetic construct
  REGION 1..10: note = Synthetic n-mer insert
VLAPVQGTQR

SEQ ID NO: 514 - protein, 10 aa, synthetic construct
  REGION 1..10: note = Synthetic n-mer insert
KEAPDQGTGR

SEQ ID NO: 515 - protein, 10 aa, synthetic construct
  REGION 1..10: note = Synthetic n-mer insert
ASEPSQGTQR

SEQ ID NO: 516 - protein, 10 aa, synthetic construct
  REGION 1..10: note = Synthetic n-mer insert
IYGPNQGTLR

SEQ ID NO: 517 - protein, 10 aa, synthetic construct
  REGION 1..10: note = Synthetic n-mer insert
TERPVQGTFR

SEQ ID NO: 518 - protein, 10 aa, synthetic construct
  REGION 1..10: note = Synthetic n-mer insert
GATPLQGTLR

SEQ ID NO: 519 - protein, 10 aa, synthetic construct
  REGION 1..10: note = Synthetic n-mer insert
LAGPMQGTIR

SEQ ID NO: 520 - protein, 10 aa, synthetic construct
  REGION 1..10: note = Synthetic n-mer insert
EVRPIQGTVR

SEQ ID NO: 521 - protein, 10 aa, synthetic construct
  REGION 1..10: note = Synthetic n-mer insert
MANPIQGTVR

SEQ ID NO: 522 - protein, 10 aa, synthetic construct
  REGION 1..10: note = Synthetic n-mer insert
TREPQQGTFR

SEQ ID NO: 523 - protein, 10 aa, synthetic construct
  REGION 1..10: note = Synthetic n-mer insert
MKDPIQGTYR

SEQ ID NO: 524 - protein, 10 aa, synthetic construct
  REGION 1..10: note = Synthetic n-mer insert
LSEPPQGTLR

SEQ ID NO: 525 - protein, 10 aa, synthetic construct
  REGION 1..10: note = Synthetic n-mer insert
LMEPRQGTVR

SEQ ID NO: 526 - protein, 10 aa, synthetic construct
  REGION 1..10: note = Synthetic n-mer insert
VASPMQGTSR

SEQ ID NO: 527 - protein, 10 aa, synthetic construct
  REGION 1..10: note = Synthetic n-mer insert
QTFPNQGTMR

SEQ ID NO: 528 - protein, 10 aa, synthetic construct
  REGION 1..10: note = Synthetic n-mer insert
MNRPTQGTER

SEQ ID NO: 529 - protein, 10 aa, synthetic construct
  REGION 1..10: note = Synthetic n-mer insert
EVPPSQGTLR

SEQ ID NO: 530 - protein, 10 aa, synthetic construct
  REGION 1..10: note = Synthetic n-mer insert
VTGPPQGTYR

SEQ ID NO: 531 - protein, 10 aa, synthetic construct
  REGION 1..10: note = Synthetic n-mer insert
SHVPAQGTMR

SEQ ID NO: 532 - protein, 10 aa, synthetic construct
  REGION 1..10: note = Synthetic n-mer insert
MVMPVQGTVR

SEQ ID NO: 533 - protein, 10 aa, synthetic construct
  REGION 1..10: note = Synthetic n-mer insert
SDKPVQGTMR

SEQ ID NO: 534 - protein, 10 aa, synthetic construct
  REGION 1..10: note = Synthetic n-mer insert
SVAPTQGTIR

SEQ ID NO: 535 - protein, 10 aa, synthetic construct
  REGION 1..10: note = Synthetic n-mer insert
GTTPDQGTMR

SEQ ID NO: 536 - protein, 10 aa, synthetic construct
  REGION 1..10: note = Synthetic n-mer insert
GSEPNQGTYR

SEQ ID NO: 537 - protein, 10 aa, synthetic construct
  REGION 1..10: note = Synthetic n-mer insert
GPMPIQGTLR

SEQ ID NO: 538 - protein, 10 aa, synthetic construct
  REGION 1..10: note = Synthetic n-mer insert
NQMPMQGTAR

SEQ ID NO: 539 - protein, 10 aa, synthetic construct
  REGION 1..10: note = Synthetic n-mer insert
GNTPVQGTVR

SEQ ID NO: 540 - protein, 10 aa, synthetic construct
  REGION 1..10: note = Synthetic n-mer insert
SANPLQGTIR

SEQ ID NO: 541 - protein, 10 aa, synthetic construct
  REGION 1..10: note = Synthetic n-mer insert
MSFPSQGTHR

SEQ ID NO: 542 - protein, 10 aa, synthetic construct
  REGION 1..10: note = Synthetic n-mer insert
NPDPIQGTIR

SEQ ID NO: 543 - protein, 10 aa, synthetic construct
  REGION 1..10: note = Synthetic n-mer insert
EMNPVQGTNR

SEQ ID NO: 544 - protein, 10 aa, synthetic construct
  REGION 1..10: note = Synthetic n-mer insert
TVLPNQGTVR

SEQ ID NO: 545 - protein, 10 aa, synthetic construct
  REGION 1..10: note = Synthetic n-mer insert
VIQPVQGTVR

SEQ ID NO: 546 - protein, 10 aa, synthetic construct
  REGION 1..10: note = Synthetic n-mer insert
QTFPEQGTMR

SEQ ID NO: 547 - protein, 10 aa, synthetic construct
  REGION 1..10: note = Synthetic n-mer insert
VLTPSQGTTR

SEQ ID NO: 548 - protein, 10 aa, synthetic construct
  REGION 1..10: note = Synthetic n-mer insert
NNGPMQGTVR

SEQ ID NO: 549 - protein, 10 aa, synthetic construct
  REGION 1..10: note = Synthetic n-mer insert
VETPNQGTHR

SEQ ID NO: 550 - protein, 10 aa, synthetic construct
  REGION 1..10: note = Synthetic n-mer insert
SLVPNQGTVR

SEQ ID NO: 551 - protein, 10 aa, synthetic construct
  REGION 1..10: note = Synthetic n-mer insert
DSAPHQGTYR

SEQ ID NO: 552 - protein, 10 aa, synthetic construct
  REGION 1..10: note = Synthetic n-mer insert
DHGPSQGTSR

SEQ ID NO: 553 - protein, 10 aa, synthetic construct
  REGION 1..10: note = Synthetic n-mer insert
AAMPGQGTVR

SEQ ID NO: 554 - protein, 10 aa, synthetic construct
  REGION 1..10: note = Synthetic n-mer insert
ISSPGQGTDR

SEQ ID NO: 555 - protein, 10 aa, synthetic construct
  REGION 1..10: note = Synthetic n-mer insert
NVSPSQGTLR

SEQ ID NO: 556 - protein, 10 aa, synthetic construct
  REGION 1..10: note = Synthetic n-mer insert
SSIPIQGTSR

SEQ ID NO: 557 - protein, 10 aa, synthetic construct
  REGION 1..10: note = Synthetic n-mer insert
GSVPGQGTTR

SEQ ID NO: 558 - protein, 10 aa, synthetic construct
  REGION 1..10: note = Synthetic n-mer insert
MREPSQGTSR

SEQ ID NO: 559 - protein, 10 aa, synthetic construct
  REGION 1..10: note = Synthetic n-mer insert
TDQPSQGTVR

SEQ ID NO: 560 - protein, 10 aa, synthetic construct
  REGION 1..10: note = Synthetic n-mer insert
MMQPVQGTSR

SEQ ID NO: 561 - protein, 10 aa, synthetic construct
  REGION 1..10: note = Synthetic n-mer insert
SFQPGQGTLR

SEQ ID NO: 562 - protein, 10 aa, synthetic construct
  REGION 1..10: note = Synthetic n-mer insert
MNAPSQGTTR

SEQ ID NO: 563 - protein, 10 aa, synthetic construct
  REGION 1..10: note = Synthetic n-mer insert
NEVPTQGTAR

SEQ ID NO: 564 - protein, 10 aa, synthetic construct
  REGION 1..10: note = Synthetic n-mer insert
VSGPEQGTSR

SEQ ID NO: 565 - protein, 10 aa, synthetic construct
  REGION 1..10: note = Synthetic n-mer insert
GYEPAQGTMR

SEQ ID NO: 566 - protein, 10 aa, synthetic construct
  REGION 1..10: note = Synthetic n-mer insert
SLIPDQGTIR

SEQ ID NO: 567 - protein, 10 aa, synthetic construct
  REGION 1..10: note = Synthetic n-mer insert
DYGPSQGTVR

SEQ ID NO: 568 - protein, 10 aa, synthetic construct
  REGION 1..10: note = Synthetic n-mer insert
TELPMQGTVR

SEQ ID NO: 569 - protein, 10 aa, synthetic construct
  REGION 1..10: note = Synthetic n-mer insert
SYMPLQGTVR

SEQ ID NO: 570 - protein, 10 aa, synthetic construct
  REGION 1..10: note = Synthetic n-mer insert
DYKPNQGTVR

SEQ ID NO: 571 - protein, 10 aa, synthetic construct
  REGION 1..10: note = Synthetic n-mer insert
DTKPNQGTVR

SEQ ID NO: 572 - protein, 10 aa, synthetic construct
  REGION 1..10: note = Synthetic n-mer insert
MNTPAQGTLR

SEQ ID NO: 573 - protein, 10 aa, synthetic construct
  REGION 1..10: note = Synthetic n-mer insert
VMNPEQGTAR

SEQ ID NO: 574 - protein, 10 aa, synthetic construct
  REGION 1..10: note = Synthetic n-mer insert
EILPGQGTLR

SEQ ID NO: 575 - protein, 10 aa, synthetic construct
  REGION 1..10: note = Synthetic n-mer insert
MPSPAQGTIR

SEQ ID NO: 576 - protein, 10 aa, synthetic construct
  REGION 1..10: note = Synthetic n-mer insert
NVIPEQGTNR

SEQ ID NO: 577 - protein, 10 aa, synthetic construct
  REGION 1..10: note = Synthetic n-mer insert
QMEPHQGTTR

SEQ ID NO: 578 - protein, 10 aa, synthetic construct
  REGION 1..10: note = Synthetic n-mer insert
FVVPDQGTNR

SEQ ID NO: 579 - protein, 10 aa, synthetic construct
  REGION 1..10: note = Synthetic n-mer insert
ENNPGQGTTR

SEQ ID NO: 580 - protein, 10 aa, synthetic construct
  REGION 1..10: note = Synthetic n-mer insert
NWKPEQGTDR

SEQ ID NO: 581 - protein, 10 aa, synthetic construct
  REGION 1..10: note = Synthetic n-mer insert
SVSPNQGTIR

SEQ ID NO: 582 - protein, 10 aa, synthetic construct
  REGION 1..10: note = Synthetic n-mer insert
DPSPLQGTDR

SEQ ID NO: 583 - protein, 7 aa, synthetic construct
  REGION 1..7: note = n-mer motif
RSVGSVY

SEQ ID NO: 584 - DNA, 21 bp, synthetic construct
  misc_feature 1..21: note = n-mer motif encoding polynucleotide
  source 1..21: mol_type = other DNA
cggagtgttgggagtgtgtat

SEQ ID NO: 585 - protein, 7 aa, synthetic construct
  REGION 1..7: note = n-mer motif
KTVGTVY

SEQ ID NO: 586 - DNA, 21 bp, synthetic construct
  misc_feature 1..21: note = n-mer motif encoding polynucleotide
  source 1..21: mol_type = other DNA
aagactgtgggtactgtttat

SEQ ID NO: 587 - protein, 7 aa, synthetic construct
  REGION 1..7: note = n-mer motif
KTVGTVY

SEQ ID NO: 588 - DNA, 21 bp, synthetic construct
  misc_feature 1..21: note = n-mer motif encoding polynucleotide
  source 1..21: mol_type = other DNA
aaaaccgtcggcacagtgtac

SEQ ID NO: 589 - protein, 7 aa, synthetic construct
  REGION 1..7: note = n-mer motif
RSVGSVY

SEQ ID NO: 590 - DNA, 21 bp, synthetic construct
  misc_feature 1..21: note = n-mer motif encoding polynucleotide
  source 1..21: mol_type = other DNA
cgatccgtcggaagcgtttac

SEQ ID NO: 591 - protein, 7 aa, synthetic construct
  REGION 1..7: note = n-mer motif
RYLGDAS

SEQ ID NO: 592 - DNA, 21 bp, synthetic construct
  misc_feature 1..21: note = n-mer motif encoding polynucleotide
  source 1..21: mol_type = other DNA
cgttacttaggagacgcctct

SEQ ID NO: 593 - protein, 7 aa, synthetic construct
  REGION 1..7: note = n-mer motif
WVLPSGG

SEQ ID NO: 594 - DNA, 21 bp, synthetic construct
  misc_feature 1..21: note = n-mer motif encoding polynucleotide
  source 1..21: mol_type = other DNA
tgggtgctaccatctggcggc

SEQ ID NO: 595 - protein, 7 aa, synthetic construct
  REGION 1..7: note = n-mer motif
WVLPSGG

SEQ ID NO: 596 - DNA, 21 bp, synthetic construct
  misc_feature 1..21: note = n-mer motif encoding polynucleotide
  source 1..21: mol_type = other DNA
tgggttctgcctagtggtggg

SEQ ID NO: 597 - protein, 7 aa, synthetic construct
  REGION 1..7: note = n-mer motif
VTVGSIY

SEQ ID NO: 598 - DNA, 21 bp, synthetic construct
  misc_feature 1..21: note = n-mer motif encoding polynucleotide
  source 1..21: mol_type = other DNA
gtaacagtgggcagcatctac

SEQ ID NO: 599 - protein, 7 aa, synthetic construct
  REGION 1..7: note = n-mer motif
VRGSSIL

SEQ ID NO: 600 - DNA, 21 bp, synthetic construct
  misc_feature 1..21: note = n-mer motif encoding polynucleotide
  source 1..21: mol_type = other DNA
gtgcgtgggtcgtcgattctt

SEQ ID NO: 601 - protein, 7 aa, synthetic construct
  REGION 1..7: note = n-mer motif
RYLGDAS

SEQ ID NO: 602 - DNA, 21 bp, synthetic construct
  misc_feature 1..21: note = n-mer motif encoding polynucleotide
  source 1..21: mol_type = other DNA
cggtatttgggggatgcttcg

SEQ ID NO: 603 - protein, 7 aa, synthetic construct
  REGION 1..7: note = n-mer motif
VIQAMKL

SEQ ID NO: 604 - DNA, 21 bp, synthetic construct
  misc_feature 1..21: note = n-mer motif encoding polynucleotide
  source 1..21: mol_type = other DNA
gtgattcaggctatgaagttg

SEQ ID NO: 605 - protein, 7 aa, synthetic construct
  REGION 1..7: note = n-mer motif
LTYGMAQ

SEQ ID NO: 606 - DNA, 21 bp, synthetic construct
  misc_feature 1..21: note = n-mer motif encoding polynucleotide
  source 1..21: mol_type = other DNA
ctgacttatggtatggctcag

SEQ ID NO: 607 - protein, 7 aa, synthetic construct
  REGION 1..7: note = n-mer motif
LRIGLSQ

SEQ ID NO: 608 - DNA, 21 bp, synthetic construct
  misc_feature 1..21: note = n-mer motif encoding polynucleotide
  source 1..21: mol_type = other DNA
cttcggattgggctgtcgcag

SEQ ID NO: 609 - protein, 7 aa, synthetic construct
  REGION 1..7: note = n-mer motif
RYSGDAS

SEQ ID NO: 610 - DNA, 21 bp, synthetic construct
  misc_feature 1..21: note = n-mer motif encoding polynucleotide
  source 1..21: mol_type = other DNA
cggtactcaggagacgcttct

SEQ ID NO: 611 - protein, 7 aa, synthetic construct
  REGION 1..7: note = n-mer motif
RHHGDAA

SEQ ID NO: 612 - DNA, 21 bp, synthetic construct
  misc_feature 1..21: note = n-mer motif encoding polynucleotide
  source 1..21: mol_type = other DNA
cggcatcatggtgatgcggcg

SEQ ID NO: 613 - protein, 7 aa, synthetic construct
  REGION 1..7: note = n-mer motif
VNYSVAL

SEQ ID NO: 614 - DNA, 21 bp, synthetic construct
  misc_feature 1..21: note = n-mer motif encoding polynucleotide
  source 1..21: mol_type = other DNA
gtgaactacagtgtcgctcta

SEQ ID NO: 615 - protein, 7 aa, synthetic construct
  REGION 1..7: note = n-mer motif
RHIADAS

SEQ ID NO: 616 - DNA, 21 bp, synthetic construct
  misc_feature 1..21: note = n-mer motif encoding polynucleotide
  source 1..21: mol_type = other DNA
cgtcatattgctgatgctagt

SEQ ID NO: 617 - protein, 7 aa, synthetic construct
  REGION 1..7: note = n-mer motif
RYLGDAT

SEQ ID NO: 618 - DNA, 21 bp, synthetic construct
  misc_feature 1..21: note = n-mer motif encoding polynucleotide
  source 1..21: mol_type = other DNA
cggtatttgggggatgctacg

SEQ ID NO: 619 - protein, 7 aa, synthetic construct
  REGION 1..7: note = n-mer motif
QRVGFAQ

SEQ ID NO: 620 - DNA, 21 bp, synthetic construct
  misc_feature 1..21: note = n-mer motif encoding polynucleotide
  source 1..21: mol_type = other DNA
caacgagtcgggttcgcacaa

SEQ ID NO: 621 - protein, 7 aa, synthetic construct
  REGION 1..7: note = n-mer motif
RYSGDSV

SEQ ID NO: 622 - DNA, 21 bp, synthetic construct
  misc_feature 1..21: note = n-mer motif encoding polynucleotide
  source 1..21: mol_type = other DNA
aggtactcaggcgactcagtc

SEQ ID NO: 623 - protein, 7 aa, synthetic construct
  REGION 1..7: note = n-mer motif
RHIADAS

SEQ ID NO: 624 - DNA, 21 bp, synthetic construct
  misc_feature 1..21: note = n-mer motif encoding polynucleotide
  source 1..21: mol_type = other DNA
agacacatagcggacgcgtcg

SEQ ID NO: 625 - protein, 7 aa, synthetic construct
  REGION 1..7: note = n-mer motif
IAHGYST

SEQ ID NO: 626 - DNA, 21 bp, synthetic construct
  misc_feature 1..21: note = n-mer motif encoding polynucleotide
  source 1..21: mol_type = other DNA
attgctcatgggtattcgact

SEQ ID NO: 627 - protein, 7 aa, synthetic construct
  REGION 1..7: note = n-mer motif
VNYSVAL

SEQ ID NO: 628 - DNA, 21 bp, synthetic construct
  misc_feature 1..21: note = n-mer motif encoding polynucleotide
  source 1..21: mol_type = other DNA
gttaattattcggtggcgctt

SEQ ID NO: 629 - protein, 7 aa, synthetic construct
  REGION 1..7: note = n-mer motif
WTLESGH

SEQ ID NO: 630 - DNA, 21 bp, synthetic construct
  misc_feature 1..21: note = n-mer motif encoding polynucleotide
  source 1..21: mol_type = other DNA
tggaccttagaaagcgggcac

SEQ ID NO: 631 - protein, 7 aa, synthetic construct
  REGION 1..7: note = n-mer motif
RYSGDSV

SEQ ID NO: 632 - DNA, 21 bp, synthetic construct
  misc_feature 1..21: note = n-mer motif encoding polynucleotide
  source 1..21: mol_type = other DNA
cgttattcgggggattcggtt

SEQ ID NO: 633 - protein, 7 aa, synthetic construct
  REGION 1..7: note = n-mer motif
WTLESGH

SEQ ID NO: 634 - DNA, 21 bp, synthetic construct
  misc_feature 1..21: note = n-mer motif encoding polynucleotide
  source 1..21: mol_type = other DNA
tggactctggagtctggtcat

SEQ ID NO: 635 - protein, 7 aa, synthetic construct
  REGION 1..7: note = n-mer motif
VTVGSIY

SEQ ID NO: 636 - DNA, 21 bp, synthetic construct
  misc_feature 1..21: note = n-mer motif encoding polynucleotide
  source 1..21: mol_type = other DNA
gttactgttgggtctatttat

SEQ ID NO: 637 - protein, 7 aa, synthetic construct
  REGION 1..7: note = n-mer motif
RYLGDAT

SEQ ID NO: 638 - DNA, 21 bp, synthetic construct
  misc_feature 1..21: note = n-mer motif encoding polynucleotide
  source 1..21: mol_type = other DNA
cgatacctaggtgacgcaacc

SEQ ID NO: 639 - protein, 7 aa, synthetic construct
  REGION 1..7: note = n-mer motif
RYSGDAS

SEQ ID NO: 640 - DNA, 21 bp, synthetic construct
  misc_feature 1..21: note = n-mer motif encoding polynucleotide
  source 1..21: mol_type = other DNA
aggtattcgggtgatgcgagt

SEQ ID NO: 641 - protein, 7 aa, synthetic construct
  REGION 1..7: note = n-mer motif
GDYSMIV

SEQ ID NO: 642 - DNA, 21 bp, synthetic construct
  misc_feature 1..21: note = n-mer motif encoding polynucleotide
  source 1..21: mol_type = other DNA
ggagactactctatgatagtc

SEQ ID NO: 643 - protein, 7 aa, synthetic construct
  REGION 1..7: note = n-mer motif
GENSARW

SEQ ID NO: 644 - DNA, 21 bp, synthetic construct
  misc_feature 1..21: note = n-mer motif encoding polynucleotide
  source 1..21: mol_type = other DNA
ggggaaaactctgccagatgg

SEQ ID NO: 645 - protein, 7 aa, synthetic construct
  REGION 1..7: note = n-mer motif
LAVGQKW

SEQ ID NO: 646 - DNA, 21 bp, synthetic construct
  misc_feature 1..21: note = n-mer motif encoding polynucleotide
  source 1..21: mol_type = other DNA
ttggcggtggggcagaagtgg

SEQ ID NO: 647 - protein, 7 aa, synthetic construct
  REGION 1..7: note = n-mer motif
SLDKPFK

SEQ ID NO: 648 - DNA, 21 bp, synthetic construct
  misc_feature 1..21: note = n-mer motif encoding polynucleotide
  source 1..21: mol_type = other DNA
agtttggataagccttttaag

SEQ ID NO: 649 - protein, 7 aa, synthetic construct
  REGION 1..7: note = n-mer motif
TLAVPFK

SEQ ID NO: 650 - DNA, 21 bp, synthetic construct
  misc_feature 1..21: note = n-mer motif encoding polynucleotide
  source 1..21: mol_type = other DNA
actttggcggtgccttttaag

SEQ ID NO: 651 - protein, 7 aa, synthetic construct
  REGION 1..7: note = n-mer motif
SLDKPFK

SEQ ID NO: 652 - DNA, 21 bp, synthetic construct
  misc_feature 1..21: note = n-mer motif encoding polynucleotide
  source 1..21: mol_type = other DNA
agcttagacaaaccattcaaa

SEQ ID NO: 653 - protein, 7 aa, synthetic construct
  REGION 1..7: note = n-mer motif
RHHGDAA

SEQ ID NO: 654 - DNA, 21 bp, synthetic construct
  misc_feature 1..21: note = n-mer motif encoding polynucleotide
  source 1..21: mol_type = other DNA
agacaccacggggacgccgca

SEQ ID NO: 655 - protein, 7 aa, synthetic construct
  REGION 1..7: note = n-mer motif
VKLGYSQ

SEQ ID NO: 656 - DNA, 21 bp, synthetic construct
  misc_feature 1..21: note = n-mer motif encoding polynucleotide
  source 1..21: mol_type = other DNA
gtgaagcttgggtattcgcag

SEQ ID NO: 657 - protein, 7 aa, synthetic construct
  REGION 1..7: note = n-mer motif
GDYSMIV

SEQ ID NO: 658 - DNA, 21 bp, synthetic construct
  misc_feature 1..21: note = n-mer motif encoding polynucleotide
  source 1..21: mol_type = other DNA
ggggattattcgatgattgtg

SEQ ID NO: 659 - protein, 7 aa, synthetic construct
  REGION 1..7: note = n-mer motif
VRGSSIL

SEQ ID NO: 660 - DNA, 21 bp, synthetic construct
  misc_feature 1..21: note = n-mer motif encoding polynucleotide
  source 1..21: mol_type = other DNA
gtaagaggttccagcatccta

SEQ ID NO: 661 - protein, 7 aa, synthetic construct
  REGION 1..7: note = n-mer motif
EAGSARW

SEQ ID NO: 662 - DNA, 21 bp, synthetic construct
  misc_feature 1..21: note = n-mer motif encoding polynucleotide
  source 1..21: mol_type = other DNA
gaagcaggttccgctcgatgg

SEQ ID NO: 663 - protein, 7 aa, synthetic construct
  REGION 1..7: note = n-mer motif
EAGSARW

SEQ ID NO: 664 - DNA, 21 bp, synthetic construct
  misc_feature 1..21: note = n-mer motif encoding polynucleotide
  source 1..21: mol_type = other DNA
gaggcggggagtgcgcggtgg

SEQ ID NO: 665 - protein, 7 aa, synthetic construct
  REGION 1..7: note = n-mer motif
QRVGFAQ

SEQ ID NO: 666 - DNA, 21 bp, synthetic construct
  misc_feature 1..21: note = n-mer motif encoding polynucleotide
  source 1..21: mol_type = other DNA
cagagggtgggttttgcgcag

SEQ ID NO: 667 - protein, 7 aa, synthetic construct
  REGION 1..7: note = n-mer motif
WAISDGY

SEQ ID NO: 668 - DNA, 21 bp, synthetic construct
  misc_feature 1..21: note = n-mer motif encoding polynucleotide
  source 1..21: mol_type = other DNA
tgggcaatctctgacggctac

SEQ ID NO: 669 - protein, 7 aa, synthetic construct
  REGION 1..7: note = n-mer motif
LTYGMAQ

SEQ ID NO: 670 - DNA, 21 bp, synthetic construct
  misc_feature 1..21: note = n-mer motif encoding polynucleotide
  source 1..21: mol_type = other DNA
cttacgtacgggatggcacaa

SEQ ID NO: 671 - protein, 7 aa, synthetic construct
  REGION 1..7: note = n-mer motif
RGPGLSQ

SEQ ID NO: 672 - DNA, 21 bp, synthetic construct
  misc_feature 1..21: note = n-mer motif encoding polynucleotide
  source 1..21: mol_type = other DNA
cgaggcccaggccttagccaa

SEQ ID NO: 673 - protein, 7 aa, synthetic construct
  REGION 1..7: note = n-mer motif
SVSKPFL

SEQ ID NO: 674 - DNA, 21 bp, synthetic construct
  misc_feature 1..21: note = n-mer motif encoding polynucleotide
  source 1..21: mol_type = other DNA
agtgtgagtaagccttttttg

SEQ ID NO: 675 - protein, 7 aa, synthetic construct
  REGION 1..7: note = n-mer motif
LRIGLSQ

SEQ ID NO: 676 - DNA, 21 bp, synthetic construct
  misc_feature 1..21: note = n-mer motif encoding polynucleotide
  source 1..21: mol_type = other DNA
ctacgcataggcctaagccaa

SEQ ID NO: 677 - protein, 7 aa, synthetic construct
  REGION 1..7: note = n-mer motif
RGPGLSQ

SEQ ID NO: 678 - DNA, 21 bp, synthetic construct
  misc_feature 1..21: note = n-mer motif encoding polynucleotide
  source 1..21: mol_type = other DNA
cggggtcctgggctgtctcag

SEQ ID NO: 679 - protein, 7 aa, synthetic construct
  REGION 1..7: note = n-mer motif
IAHGYST

SEQ ID NO: 680 - DNA, 21 bp, synthetic construct
  misc_feature 1..21: note = n-mer motif encoding polynucleotide
  source 1..21: mol_type = other DNA
atcgcccacggatacagcaca

SEQ ID NO: 681 - protein, 7 aa, synthetic construct
  REGION 1..7: note = n-mer motif
RYVGESS

SEQ ID NO: 682 - DNA, 21 bp, synthetic construct
  misc_feature 1..21: note = n-mer motif encoding polynucleotide
  source 1..21: mol_type = other DNA
aggtatgtgggggagtcttcg

SEQ ID NO: 683 - protein, 7 aa, synthetic construct
  REGION 1..7: note = n-mer motif
VIQAMKL

SEQ ID NO: 684 - DNA, 21 bp, synthetic construct
  misc_feature 1..21: note = n-mer motif encoding polynucleotide
  source 1..21: mol_type = other DNA
gttatccaagcgatgaaacta

SEQ ID NO: 685 - protein, 7 aa, synthetic construct
  REGION 1..7: note = n-mer motif
GPTMLFK

SEQ ID NO: 686 - DNA, 21 bp, synthetic construct
  misc_feature 1..21: note = n-mer motif encoding polynucleotide
  source 1..21: mol_type = other DNA
ggcccaacaatgttattcaaa

SEQ ID NO: 687 - protein, 7 aa, synthetic construct
  REGION 1..7: note = n-mer motif
GENSARW

SEQ ID NO: 688 - DNA, 21 bp, synthetic construct
  misc_feature 1..21: note = n-mer motif encoding polynucleotide
  source 1..21: mol_type = other DNA
ggtgagaatagtgctcggtgg

SEQ ID NO: 689 - protein, 7 aa, synthetic construct
  REGION 1..7: note = n-mer motif
LAVGQKW

SEQ ID NO: 690 - DNA, 21 bp, synthetic construct
  misc_feature 1..21: note = n-mer motif encoding polynucleotide
  source 1..21: mol_type = other DNA
ctcgctgtcggacaaaaatgg

SEQ ID NO: 691 - protein, 7 aa, synthetic construct
  REGION 1..7: note = n-mer motif
FTLTTPK

SEQ ID NO: 692 - DNA, 21 bp, synthetic construct
  misc_feature 1..21: note = n-mer motif encoding polynucleotide
  source 1..21: mol_type = other DNA
tttacgttgacgacgcctaag

SEQ ID NO: 693 - protein, 7 aa, synthetic construct
  REGION 1..7: note = n-mer motif
EDLLRLR

SEQ ID NO: 694 - DNA, 21 bp, synthetic construct
  misc_feature 1..21: note = n-mer motif encoding polynucleotide
  source 1..21: mol_type = other DNA
gaggatcttttgcgtcttagg

SEQ ID NO: 695 - protein, 7 aa, synthetic construct
  REGION 1..7: note = n-mer motif
LNYSVSL

SEQ ID NO: 696 - DNA, 21 bp, synthetic construct
  misc_feature 1..21: note = n-mer motif encoding polynucleotide
  source 1..21: mol_type = other DNA
ctgaactacagtgtatcccta

SEQ ID NO: 697 - protein, 7 aa, synthetic construct
  REGION 1..7: note = n-mer motif
WAISDGY

SEQ ID NO: 698 - DNA, 21 bp, synthetic construct
  misc_feature 1..21: note = n-mer motif encoding polynucleotide
  source 1..21: mol_type = other DNA
tgggcgattagtgatgggtat

SEQ ID NO: 699 - protein, 7 aa, synthetic construct
  REGION 1..7: note = n-mer motif
GPTMLFK

SEQ ID NO: 700 - DNA, 21 bp, synthetic construct
  misc_feature 1..21: note = n-mer motif encoding polynucleotide
  source 1..21: mol_type = other DNA
ggtccgacgatgttgtttaag

SEQ ID NO: 701 - protein, 7 aa, synthetic construct
  REGION 1..7: note = n-mer motif
RYVGESS

SEQ ID NO: 702 - DNA, 21 bp, synthetic construct
  misc_feature 1..21: note = n-mer motif encoding polynucleotide
  source 1..21: mol_type = other DNA
agatacgtaggtgaaagttct

SEQ ID NO: 703 - protein, 7 aa, synthetic construct
  REGION 1..7: note = n-mer motif
PIIEHAV

SEQ ID NO: 704 - DNA, 21 bp, synthetic construct
  misc_feature 1..21: note = n-mer motif encoding polynucleotide
  source 1..21: mol_type = other DNA
ccgattattgagcatgcggtg

SEQ ID NO: 705 - protein, 7 aa, synthetic construct
  REGION 1..7: note = n-mer motif
SLSTPFR

SEQ ID NO: 706 - DNA, 21 bp, synthetic construct
  misc_feature 1..21: note = n-mer motif encoding polynucleotide
  source 1..21: mol_type = other DNA
tctctttctacgccttttcgt

SEQ ID NO: 707 - protein, 7 aa, synthetic construct
  REGION 1..7: note = n-mer motif
VKLGYSQ

SEQ ID NO: 708 - DNA, 21 bp, synthetic construct
  misc_feature 1..21: note = n-mer motif encoding polynucleotide
  source 1..21: mol_type = other DNA
gttaaattgggttactcccaa

SEQ ID NO: 709 - protein, 7 aa, synthetic construct
  REGION 1..7: note = n-mer motif
LNYSVSL

SEQ ID NO: 710 - DNA, 21 bp, synthetic construct
  misc_feature 1..21: note = n-mer motif encoding polynucleotide
  source 1..21: mol_type = other DNA
ttgaattattctgtgagtttg

SEQ ID NO: 711 - protein, 7 aa, synthetic construct
  REGION 1..7: note = n-mer motif
LGTYELD

SEQ ID NO: 712 - DNA, 21 bp, synthetic construct
  misc_feature 1..21: note = n-mer motif encoding polynucleotide
  source 1..21: mol_type = other DNA
cttgggacttatgagcttgat

SEQ ID NO: 713 - protein, 7 aa, synthetic construct
  REGION 1..7: note = n-mer motif
PIIEHAV

SEQ ID NO: 714 - DNA, 21 bp, synthetic construct
  misc_feature 1..21: note = n-mer motif encoding polynucleotide
  source 1..21: mol_type = other DNA
cccataatagaacacgcagta

SEQ ID NO: 715 - protein, 7 aa, synthetic construct
  REGION 1..7: note = n-mer motif
RYISDSA

SEQ ID NO: 716 - DNA, 21 bp, synthetic construct
  misc_feature 1..21: note = n-mer motif encoding polynucleotide
  source 1..21: mol_type = other DNA
cgatacataagtgactccgct

SEQ ID NO: 717 - protein, 7 aa, synthetic construct
  REGION 1..7: note = n-mer motif
WSTSSGF

SEQ ID NO: 718 - DNA, 21 bp, synthetic construct
  misc_feature 1..21: note = n-mer motif encoding polynucleotide
  source 1..21: mol_type = other DNA
tggagtacatcatcgggattc

SEQ ID NO: 719 - protein, 7 aa, synthetic construct
  REGION 1..7: note = n-mer motif
WSLGSGH

SEQ ID NO: 720 - DNA, 21 bp, synthetic construct
  misc_feature 1..21: note = n-mer motif encoding polynucleotide
  source 1..21: mol_type = other DNA
tggtcactaggaagtggtcac

SEQ ID NO: 721 - protein, 7 aa, synthetic construct
  REGION 1..7: note = n-mer motif
WSQSSGY

SEQ ID NO: 722 - DNA, 21 bp, synthetic construct
  misc_feature 1..21: note = n-mer motif encoding polynucleotide
  source 1..21: mol_type = other DNA
tggagtcagtctagtggttat

SEQ ID NO: 723 - protein, 7 aa, synthetic construct
  REGION 1..7: note = n-mer motif
EDLLRLR

SEQ ID NO: 724 - DNA, 21 bp, synthetic construct
  misc_feature 1..21: note = n-mer motif encoding polynucleotide
  source 1..21: mol_type = other DNA
gaagacttgctgagactgcga

SEQ ID NO: 725 - protein, 7 aa, synthetic construct
  REGION 1..7: note = n-mer motif
TEKLPFR

SEQ ID NO: 726 - DNA, 21 bp, synthetic construct
  misc_feature 1..21: note = n-mer motif encoding polynucleotide
  source 1..21: mol_type = other DNA
actgagaagctgccttttcgg

SEQ ID NO: 727 - protein, 7 aa, synthetic construct
  REGION 1..7: note = n-mer motif
IMLGYST

SEQ ID NO: 728 - DNA, 21 bp, synthetic construct
  misc_feature 1..21: note = n-mer motif encoding polynucleotide
  source 1..21: mol_type = other DNA
attatgttggggtattcgact

SEQ ID NO: 729 - protein, 7 aa, synthetic construct
  REGION 1..7: note = n-mer motif
SLSTPFR

SEQ ID NO: 730 - DNA, 21 bp, synthetic construct
  misc_feature 1..21: note = n-mer motif encoding polynucleotide
  source 1..21: mol_type = other DNA
agcctcagcacccccttccgc

SEQ ID NO: 731 - protein, 7 aa, synthetic construct
  REGION 1..7: note = n-mer motif
ASNPGRW

SEQ ID NO: 732 - DNA, 21 bp, synthetic construct
  misc_feature 1..21: note = n-mer motif encoding polynucleotide
  source 1..21: mol_type = other DNA
gcgagtaaccctggaaggtgg

SEQ ID NO: 733 - protein, 7 aa, synthetic construct
  REGION 1..7: note = n-mer motif
WSLGSGH

SEQ ID NO: 734 - DNA, 21 bp, synthetic construct
  misc_feature 1..21: note = n-mer motif encoding polynucleotide
  source 1..21: mol_type = other DNA
tggtcgttgggttctgggcat

SEQ ID NO: 735 - protein, 7 aa, synthetic construct
  REGION 1..7: note = n-mer motif
NLIKPFL

SEQ ID NO: 736 - DNA, 21 bp, synthetic construct
  misc_feature 1..21: note = n-mer motif encoding polynucleotide
  source 1..21: mol_type = other DNA
aaccttataaaaccgttcctc

SEQ ID NO: 737 - protein, 7 aa, synthetic construct
  REGION 1..7: note = n-mer motif
HVENWHI

SEQ ID NO: 738 - DNA, 21 bp, synthetic construct
  misc_feature 1..21: note = n-mer motif encoding polynucleotide
  source 1..21: mol_type = other DNA
catgtggagaattggcatatt

SEQ ID NO: 739 - protein, 7 aa, synthetic construct
  REGION 1..7: note = n-mer motif
WSQSSGY

SEQ ID NO: 740 - DNA, 21 bp, synthetic construct
  misc_feature 1..21: note = n-mer motif encoding polynucleotide
  source 1..21: mol_type = other DNA
tggtcccaaagctctgggtac

SEQ ID NO: 741 - protein, 7 aa, synthetic construct
  REGION 1..7: note = n-mer motif
WSTSSGF

SEQ ID NO: 742 - DNA, 21 bp, synthetic construct
  misc_feature 1..21: note = n-mer motif encoding polynucleotide
  source 1..21: mol_type = other DNA
tggtcgactagtagtggtttt

SEQ ID NO: 743 - protein, 7 aa, synthetic construct
  REGION 1..7: note = n-mer motif
GKSPGVW

SEQ ID NO: 744 - DNA, 21 bp, synthetic construct
  misc_feature 1..21: note = n-mer motif encoding polynucleotide
  source 1..21: mol_type = other DNA
ggcaaatcccctggagtatgg

SEQ ID NO: 745 - protein, 7 aa, synthetic construct
  REGION 1..7: note = n-mer motif
TEKLPFR

SEQ ID NO: 746 - DNA, 21 bp, synthetic construct
  misc_feature 1..21: note = n-mer motif encoding polynucleotide
  source 1..21: mol_type = other DNA
acggaaaaacttccgttcagg

SEQ ID NO: 747 - protein, 7 aa, synthetic construct
  REGION 1..7: note = n-mer motif
SLVTSST

SEQ ID NO: 748 - DNA, 21 bp, synthetic construct
  misc_feature 1..21: note = n-mer motif encoding polynucleotide
  source 1..21: mol_type = other DNA
tcgcttgttacttctagtacg

SEQ ID NO: 749 - protein, 7 aa, synthetic construct
  REGION 1..7: note = n-mer motif
LLYGYSS

SEQ ID NO: 750 - DNA, 21 bp, synthetic construct
  misc_feature 1..21: note = n-mer motif encoding polynucleotide
  source 1..21: mol_type = other DNA
cttctgtatggttattcgagt

SEQ ID NO: 751 - protein, 7 aa, synthetic construct
  REGION 1..7: note = n-mer motif
VAGSSIL

SEQ ID NO: 752 - DNA, 21 bp, synthetic construct
  misc_feature 1..21: note = n-mer motif encoding polynucleotide
  source 1..21: mol_type = other DNA
gttgcgggttcgtcgattctg

SEQ ID NO: 753 - protein, 7 aa, synthetic construct
  REGION 1..7: note = n-mer motif
GLNERVA

SEQ ID NO: 754 - DNA, 21 bp, synthetic construct
  misc_feature 1..21: note = n-mer motif encoding polynucleotide
  source 1..21: mol_type = other DNA
ggtctgaatgagcgtgtggcg

SEQ ID NO: 755 - protein, 7 aa, synthetic construct
  REGION 1..7: note = n-mer motif
LGTYELD

SEQ ID NO: 756 - DNA, 21 bp, synthetic construct
  misc_feature 1..21: note = n-mer motif encoding polynucleotide
  source 1..21: mol_type = other DNA
ttaggcacatacgaattggac

SEQ ID NO: 757 - protein, 7 aa, synthetic construct
  REGION 1..7: note = n-mer motif
KNRRHSV

SEQ ID NO: 758 - DNA, 21 bp, synthetic construct
  misc_feature 1..21: note = n-mer motif encoding polynucleotide
  source 1..21: mol_type = other DNA
aaaaaccgtcggcacagtgta

SEQ ID NO: 759 - protein, 7 aa, synthetic construct
  REGION 1..7: note = n-mer motif
YTLSQGW

SEQ ID NO: 760 - DNA, 21 bp, synthetic construct
  misc_feature 1..21: note = n-mer motif encoding polynucleotide
  source 1..21: mol_type = other DNA
tatactttgtcgcagggttgg

SEQ ID NO: 761 - protein, 7 aa, synthetic construct
  REGION 1..7: note = n-mer motif
SANPVVT

SEQ ID NO: 762 - DNA, 21 bp, synthetic construct
  misc_feature 1..21: note = n-mer motif encoding polynucleotide
  source 1..21: mol_type = other DNA
tctgcgaatccggttgtgacg

SEQ ID NO: 763 - protein, 7 aa, synthetic construct
  REGION 1..7: note = n-mer motif
VAGSSIL

SEQ ID NO: 764 - DNA, 21 bp, synthetic construct
  misc_feature 1..21: note = n-mer motif encoding polynucleotide
  source 1..21: mol_type = other DNA
gtagctgggagcagcatcttg

SEQ ID NO: 765 - protein, 7 aa, synthetic construct
  REGION 1..7: note = n-mer motif
NLIKPFL

SEQ ID NO: 766 - DNA, 21 bp, synthetic construct
  misc_feature 1..21: note = n-mer motif encoding polynucleotide
  source 1..21: mol_type = other DNA
aatttgattaagccttttctt

SEQ ID NO: 767 - protein, 7 aa, synthetic construct
  REGION 1..7: note = n-mer motif
GGTSSGH

SEQ ID NO: 768 - DNA, 21 bp, synthetic construct
  misc_feature 1..21: note = n-mer motif encoding polynucleotide
  source 1..21: mol_type = other DNA
gggggtacgagtagtggtcat

SEQ ID NO: 769 - protein, 7 aa, synthetic construct
  REGION 1..7: note = n-mer motif
VLESNPR

SEQ ID NO: 770 - DNA, 21 bp, synthetic construct
  misc_feature 1..21: note = n-mer motif encoding polynucleotide
  source 1..21: mol_type = other DNA
gtgcttgagtcgaatccgcgg

SEQ ID NO: 771 - protein, 7 aa, synthetic construct
  REGION 1..7: note = n-mer motif
WADSKDQ

SEQ ID NO: 772 - DNA, 21 bp, synthetic construct
  misc_feature 1..21: note = n-mer motif encoding polynucleotide
  source 1..21: mol_type = other DNA
tgggctgatagtaaggatcag

SEQ ID NO: 773 - protein, 7 aa, synthetic construct
  REGION 1..7: note = n-mer motif
VDHGGVV

SEQ ID NO: 774 - DNA, 21 bp, synthetic construct
  misc_feature 1..21: note = n-mer motif encoding polynucleotide
  source 1..21: mol_type = other DNA
gtggatcatggtggtgtggtt

SEQ ID NO: 775 - protein, 7 aa, synthetic construct
  REGION 1..7: note = n-mer motif
ASTDSKT

SEQ ID NO: 776 - DNA, 21 bp, synthetic construct
  misc_feature 1..21: note = n-mer motif encoding polynucleotide
  source 1..21: mol_type = other DNA
gctagtactgattctaagacg

SEQ ID NO: 777 - protein, 7 aa, synthetic construct
  REGION 1..7: note = n-mer motif
KGASVTL

SEQ ID NO: 778 - DNA, 21 bp, synthetic construct
  misc_feature 1..21: note = n-mer motif encoding polynucleotide
  source 1..21: mol_type = other DNA
aagggggctagtgttacgctt

SEQ ID NO: 779 - protein, 7 aa, synthetic construct
  REGION 1..7: note = n-mer motif
SNVALTG

SEQ ID NO: 780 - DNA, 21 bp, synthetic construct
  misc_feature 1..21: note = n-mer motif encoding polynucleotide
  source 1..21: mol_type = other DNA
agcaacgttgcactgaccggc

SEQ ID NO: 781 - protein, 7 aa, synthetic construct
  REGION 1..7: note = n-mer motif
VIASNEH

SEQ ID NO: 782 - DNA, 21 bp, synthetic construct
  misc_feature 1..21: note = n-mer motif encoding polynucleotide
  source 1..21: mol_type = other DNA
gtgattgcttctaatgagcat

SEQ ID NO: 783 - protein, 7 aa, synthetic construct
  REGION 1..7: note = n-mer motif
MSVGQSW

SEQ ID NO: 784 - DNA, 21 bp, synthetic construct
  misc_feature 1..21: note = n-mer motif encoding polynucleotide
  source 1..21: mol_type = other DNA
atgtcggttgggcagtcgtgg

SEQ ID NO: 785 - protein, 7 aa, synthetic construct
  REGION 1..7: note = n-mer motif
LSNGQGP

SEQ ID NO: 786 - DNA, 21 bp, synthetic construct
  misc_feature 1..21: note = n-mer motif encoding polynucleotide
  source 1..21: mol_type = other DNA
ttgagtaatggtcagggtcct

SEQ ID NO: 787 - protein, 7 aa, synthetic construct
  REGION 1..7: note = n-mer motif
PVTDSKM

SEQ ID NO: 788 - DNA, 21 bp, synthetic construct
  misc_feature 1..21: note = n-mer motif encoding polynucleotide
  source 1..21: mol_type = other DNA
ccagtaactgactcaaaaatg

SEQ ID NO: 789 - protein, 7 aa, synthetic construct
  REGION 1..7: note = n-mer motif
AADSSGR

SEQ ID NO: 790 - DNA, 21 bp, synthetic construct
  misc_feature 1..21: note = n-mer motif encoding polynucleotide
  source 1..21: mol_type = other DNA
gcggcggatagttctgggcgg

SEQ ID NO: 791 - protein, 7 aa, synthetic construct
  REGION 1..7: note = n-mer motif
ANSHTNS

SEQ ID NO: 792 - DNA, 21 bp, synthetic construct
  misc_feature 1..21: note = n-mer motif encoding polynucleotide
  source 1..21: mol_type = other DNA
gcaaacagtcacaccaactct

SEQ ID NO: 793 - protein, 7 aa, synthetic construct
  REGION 1..7: note = n-mer motif
VGANAVA

SEQ ID NO: 794 - DNA, 21 bp, synthetic construct
  misc_feature 1..21: note = n-mer motif encoding polynucleotide
  source 1..21: mol_type = other DNA
gttggtgctaatgctgttgct

SEQ ID NO: 795 - protein, 7 aa, synthetic construct
  REGION 1..7: note = n-mer motif
HVENWHI

SEQ ID NO: 796 - DNA, 21 bp, synthetic construct
  misc_feature 1..21: note = n-mer motif encoding polynucleotide
  source 1..21: mol_type = other DNA
cacgttgaaaactggcacatc

SEQ ID NO: 797 - protein, 7 aa, synthetic construct
  REGION 1..7: note = n-mer motif
KVDQSLA

SEQ ID NO: 798 - DNA, 21 bp, synthetic construct
  misc_feature 1..21: note = n-mer motif encoding polynucleotide
  source 1..21: mol_type = other DNA
aaagtagaccaatcacttgca

SEQ ID NO: 799 - protein, 7 aa, synthetic construct
  REGION 1..7: note = n-mer motif
SGEALRL

SEQ ID NO: 800 - DNA, 21 bp, synthetic construct
  misc_feature 1..21: note = n-mer motif encoding polynucleotide
  source 1..21: mol_type = other DNA
tcaggtgaagcactacggcta

SEQ ID NO: 801 - protein, 7 aa, synthetic construct
  REGION 1..7: note = n-mer motif
VPSSTER

SEQ ID NO: 802 - DNA, 21 bp, synthetic construct
  misc_feature 1..21: note = n-mer motif encoding polynucleotide
  source 1..21: mol_type = other DNA
gttccgagttctactgagcgg

SEQ ID NO: 803 - protein, 7 aa, synthetic construct
  REGION 1..7: note = n-mer motif
VVQVNGR

SEQ ID NO: 804 - DNA, 21 bp, synthetic construct
  misc_feature 1..21: note = n-mer motif encoding polynucleotide
  source 1..21: mol_type = other DNA
gtcgtgcaagtgaacggacgc

SEQ ID NO: 805 - protein, 7 aa, synthetic construct
  REGION 1..7: note = n-mer motif
ASNPGRW

SEQ ID NO: 806 - DNA, 21 bp, synthetic construct
  misc_feature 1..21: note = n-mer motif encoding polynucleotide
  source 1..21: mol_type = other DNA
gcttcgaatccgggtcggtgg

SEQ ID NO: 807 - protein, 7 aa, synthetic construct
  REGION 1..7: note = n-mer motif
HNGQVGV

SEQ ID NO: 808 - DNA, 21 bp, synthetic construct
  misc_feature 1..21: note = n-mer motif encoding polynucleotide
  source 1..21: mol_type = other DNA
cacaacggacaagtgggagtc

SEQ ID NO: 809 - protein, 7 aa, synthetic construct
  REGION 1..7: note = n-mer motif
SLAITER

SEQ ID NO: 810 - DNA, 21 bp, synthetic construct
  misc_feature 1..21: note = n-mer motif encoding polynucleotide
  source 1..21: mol_type = other DNA
agtttggcgattactgagcgg

SEQ ID NO: 811 - protein, 7 aa, synthetic construct
  REGION 1..7: note = n-mer motif
SSAGTSA

SEQ ID NO: 812 - DNA, 21 bp, synthetic construct
  misc_feature 1..21: note = n-mer motif encoding polynucleotide
  source 1..21: mol_type = other DNA
agttcggcgggtacttcggcg

SEQ ID NO: 813 - protein, 7 aa, synthetic construct
  REGION 1..7: note = n-mer motif
SVDNRDS

SEQ ID NO: 814 - DNA, 21 bp, synthetic construct
  misc_feature 1..21: note = n-mer motif encoding polynucleotide
  source 1..21: mol_type = other DNA
agtgtggacaacagagacagt

SEQ ID NO: 815 - protein, 7 aa, synthetic construct
  REGION 1..7: note = n-mer motif
VGQTTTL

SEQ ID NO: 816 - DNA, 21 bp, synthetic construct
  misc_feature 1..21: note = n-mer motif encoding polynucleotide
  source 1..21: mol_type = other DNA
gttggccaaaccacaacattg

SEQ ID NO: 817 - protein, 7 aa, synthetic construct
  REGION 1..7: note = n-mer motif
GQVQMTS

SEQ ID NO: 818 - DNA, 21 bp, synthetic construct
  misc_feature 1..21: note = n-mer motif encoding polynucleotide
  source 1..21: mol_type = other DNA
ggtcaggtgcagatgacttct

SEQ ID NO: 819 - protein, 7 aa, synthetic construct
  REGION 1..7: note = n-mer motif
GMHVVQA

SEQ ID NO: 820 - DNA, 21 bp, synthetic construct
  misc_feature 1..21: note = n-mer motif encoding polynucleotide
  source 1..21: mol_type = other DNA
ggaatgcacgtcgtccaagca

SEQ ID NO: 821 - protein, 7 aa, synthetic construct
  REGION 1..7: note = n-mer motif
VGVPLGR

SEQ ID NO: 822 - DNA, 21 bp, synthetic construct
  misc_feature 1..21: note = n-mer motif encoding polynucleotide
  source 1..21: mol_type = other DNA
gttggggttcccctagggaga

SEQ ID NO: 823 - protein, 7 aa, synthetic construct
  REGION 1..7: note = n-mer motif
KESTLST

SEQ ID NO: 824 - DNA, 21 bp, synthetic construct
  misc_feature 1..21: note = n-mer motif encoding polynucleotide
  source 1..21: mol_type = other DNA
aaggagtctactctgagtacg

SEQ ID NO: 825 - protein, 7 aa, synthetic construct
  REGION 1..7: note = n-mer motif
RETVGST

SEQ ID NO: 826 - DNA, 21 bp, synthetic construct
  misc_feature 1..21: note = n-mer motif encoding polynucleotide
  source 1..21: mol_type = other DNA
cgcgaaaccgtaggcagtact

SEQ ID NO: 827 - protein, 7 aa, synthetic construct
  REGION 1..7: note = n-mer motif
GNGSTSL

SEQ ID NO: 828 - DNA, 21 bp, synthetic construct
  misc_feature 1..21: note = n-mer motif encoding polynucleotide
  source 1..21: mol_type = other DNA
ggtaacggaagcacatcgcta

SEQ ID NO: 829 - protein, 7 aa, synthetic construct
  REGION 1..7: note = n-mer motif
VDSTISI

SEQ ID NO: 830 - DNA, 21 bp, synthetic construct
  misc_feature 1..21: note = n-mer motif encoding polynucleotide
  source 1..21: mol_type = other DNA
ggtaacggaagcacatcgcta

SEQ ID NO: 831 - protein, 7 aa, synthetic construct
  REGION 1..7: note = n-mer motif
ASTATIR

SEQ ID NO: 832 - DNA, 21 bp, synthetic construct
  misc_feature 1..21: note = n-mer motif encoding polynucleotide
  source 1..21: mol_type = other DNA
gcgtctactgctactattcgg

SEQ ID NO: 833 - protein, 7 aa, synthetic construct
  REGION 1..7: note = n-mer motif
RSHDSET

SEQ ID NO: 834 - DNA, 21 bp, synthetic construct
  misc_feature 1..21: note = n-mer motif encoding polynucleotide
  source 1..21: mol_type = other DNA
aggagtcatgattctgagact

SEQ ID NO: 835 - protein, 7 aa, synthetic construct
  REGION 1..7: note = n-mer motif
FGSQMGA

SEQ ID NO: 836 - DNA, 21 bp, synthetic construct
  misc_feature 1..21: note = n-mer motif encoding polynucleotide
  source 1..21: mol_type = other DNA
tttgggtctcagatgggggcg

SEQ ID NO: 837 - protein, 7 aa, synthetic construct
  REGION 1..7: note = n-mer motif
SVTDVKL

SEQ ID NO: 838 - DNA, 21 bp, synthetic construct
  misc_feature 1..21: note = n-mer motif encoding polynucleotide
  source 1..21: mol_type = other DNA
tctgttactgatgttaagctt

SEQ ID NO: 839 - protein, 7 aa, synthetic construct
  REGION 1..7: note = n-mer motif
SHVSDSK

SEQ ID NO: 840 - DNA, 21 bp, synthetic construct
  misc_feature 1..21: note = n-mer motif encoding polynucleotide
  source 1..21: mol_type = other DNA
agccacgtatccgactccaaa

SEQ ID NO: 841 - protein, 7 aa, synthetic construct
  REGION 1..7: note = n-mer motif
KLAPDGT

SEQ ID NO: 842 - DNA, 21 bp, synthetic construct
  misc_feature 1..21: note = n-mer motif encoding polynucleotide
  source 1..21: mol_type = other DNA
aaacttgctcccgacggaacg

SEQ ID NO: 843 - protein, 7 aa, synthetic construct
  REGION 1..7: note = n-mer motif
YLVGYQM

SEQ ID NO: 844 - DNA, 21 bp, synthetic construct
  misc_feature 1..21: note = n-mer motif encoding polynucleotide
  source 1..21: mol_type = other DNA
tacctagtggggtaccaaatg

SEQ ID NO: 845 - protein, 7 aa, synthetic construct
  REGION 1..7: note = n-mer motif
QDKSTYK

SEQ ID NO: 846 - DNA, 21 bp, synthetic construct
  misc_feature 1..21: note = n-mer motif encoding polynucleotide
  source 1..21: mol_type = other DNA
caggataagtcgacgtataag

SEQ ID NO: 847 - protein, 7 aa, synthetic construct
  REGION 1..7: note = n-mer motif
PGGESRG

SEQ ID NO: 848 - DNA, 21 bp, synthetic construct
  misc_feature 1..21: note = n-mer motif encoding polynucleotide
  source 1..21: mol_type = other DNA
cccggaggcgaaagccgaggc

SEQ ID NO: 849 - protein, 7 aa, synthetic construct
  REGION 1..7: note = n-mer motif
LTGSVQL

SEQ ID NO: 850 - DNA, 21 bp, synthetic construct
  misc_feature 1..21: note = n-mer motif encoding polynucleotide
  source 1..21: mol_type = other DNA
cttacgggttcggttcagctt

SEQ ID NO: 851 - protein, 7 aa, synthetic construct
  REGION 1..7: note = n-mer motif
SGETLRL

SEQ ID NO: 852 - DNA, 21 bp, synthetic construct
  misc_feature 1..21: note = n-mer motif encoding polynucleotide
  source 1..21: mol_type = other DNA
agtggcgaaaccctacgtctc

SEQ ID NO: 853 - protein, 7 aa, synthetic construct
  REGION 1..7: note = n-mer motif
PSVSTLS

SEQ ID NO: 854 - DNA, 21 bp, synthetic construct
  misc_feature 1..21: note = n-mer motif encoding polynucleotide
  source 1..21: mol_type = other DNA
cctagtgtttctacgcttagt

SEQ ID NO: 855 - protein, 7 aa, synthetic construct
  REGION 1..7: note = n-mer motif
PGTVNTH

SEQ ID NO: 856 - DNA, 21 bp, synthetic construct
  misc_feature 1..21: note = n-mer motif encoding polynucleotide
  source 1..21: mol_type = other DNA
cctggtactgttaatacgcat

SEQ ID NO: 857 - protein, 7 aa, synthetic construct
  REGION 1..7: note = n-mer motif
PSQGMTS

SEQ ID NO: 858 - DNA, 21 bp, synthetic construct
  misc_feature 1..21: note = n-mer motif encoding polynucleotide
  source 1..21: mol_type = other DNA
ccatcccaaggaatgacatcc

SEQ ID NO: 859 - protein, 7 aa, synthetic construct
  REGION 1..7: note = n-mer motif
AGVLNTL

SEQ ID NO: 860 - DNA, 21 bp, synthetic construct
  misc_feature 1..21: note = n-mer motif encoding polynucleotide
  source 1..21: mol_type = other DNA
gcgggggtgctgaatactttg

SEQ ID NO: 861 - protein, 7 aa, synthetic construct
  REGION 1..7: note = n-mer motif
KNHGVDP

SEQ ID NO: 862 - DNA, 21 bp, synthetic construct
  misc_feature 1..21: note = n-mer motif encoding polynucleotide
  source 1..21: mol_type = other DNA
aaaaaccacggagtagacccc

SEQ ID NO: 863 - protein, 7 aa, synthetic construct
  REGION 1..7: note = n-mer motif
GLMTNAK

SEQ ID NO: 864 - DNA, 21 bp, synthetic construct
  misc_feature 1..21: note = n-mer motif encoding polynucleotide
  source 1..21: mol_type = other DNA
gggctgatgacgaatgcgaag

SEQ ID NO: 865 - protein, 7 aa, synthetic construct
  REGION 1..7: note = n-mer motif
MNGVHVL

SEQ ID NO: 866 - DNA, 21 bp, synthetic construct
  misc_feature 1..21: note = n-mer motif encoding polynucleotide
  source 1..21: mol_type = other DNA
atgaacggagtccacgtactt

SEQ ID NO: 867 - protein, 7 aa, synthetic construct
  REGION 1..7: note = n-mer motif
TDVHSTS

SEQ ID NO: 868 - DNA, 21 bp, synthetic construct
  misc_feature 1..21: note = n-mer motif encoding polynucleotide
  source 1..21: mol_type = other DNA
acggatgtgcattcgacttcg

SEQ ID NO: 869 - protein, 7 aa, synthetic construct
  REGION 1..7: note = n-mer motif
IMLGYST

SEQ ID NO: 870 - DNA, 21 bp, synthetic construct
  misc_feature 1..21: note = n-mer motif encoding polynucleotide
  source 1..21: mol_type = other DNA
atcatgctgggttactctacg

SEQ ID NO: 871 - protein, 7 aa, synthetic construct
  REGION 1..7: note = n-mer motif
PAEHYQA

SEQ ID NO: 872 - DNA, 21 bp, synthetic construct
  misc_feature 1..21: note = n-mer motif encoding polynucleotide
  source 1..21: mol_type = other DNA
ccggctgagcattatcaggct

SEQ ID NO: 873 - protein, 7 aa, synthetic construct
  REGION 1..7: note = n-mer motif
GQTLAES

SEQ ID NO: 874 - DNA, 21 bp, synthetic construct
  misc_feature 1..21: note = n-mer motif encoding polynucleotide
  source 1..21: mol_type = other DNA
gggcaaacattagcggaatcg

SEQ ID NO: 875 - protein, 7 aa, synthetic construct
  REGION 1..7: note = n-mer motif
SSVQGIL

SEQ ID NO: 876 - DNA, 21 bp, synthetic construct
  misc_feature 1..21: note = n-mer motif encoding polynucleotide
  source 1..21: mol_type = other DNA
tcgagtgttcaggggattctg

SEQ ID NO: 877 - protein, 7 aa, synthetic construct
  REGION 1..7: note = n-mer motif
ALSQIEV

SEQ ID NO: 878 - DNA, 21 bp, synthetic construct
  misc_feature 1..21: note = n-mer motif encoding polynucleotide
  source 1..21: mol_type = other DNA
gcgctgtcccaaatagaagtc

SEQ ID NO: 879 - protein, 7 aa, synthetic construct
  REGION 1..7: note = n-mer motif
VTTVTPV

SEQ ID NO: 880 - DNA, 21 bp, synthetic construct
  misc_feature 1..21: note = n-mer motif encoding polynucleotide
  source 1..21: mol_type = other DNA
gtcacgactgtgacccccgtt

SEQ ID NO: 881 - protein, 7 aa, synthetic construct
  REGION 1..7: note = n-mer motif
ATVTGAD

SEQ ID NO: 882 - DNA, 21 bp, synthetic construct
  misc_feature 1..21: note = n-mer motif encoding polynucleotide
  source 1..21: mol_type = other DNA
gctacggtgaccggagcagac

SEQ ID NO: 883 - protein, 7 aa, synthetic construct
  REGION 1..7: note = n-mer motif
VSGGDYS

SEQ ID NO: 884 - DNA, 21 bp, synthetic construct
  misc_feature 1..21: note = n-mer motif encoding polynucleotide
  source 1..21: mol_type = other DNA
gtctctggaggcgactactca

SEQ ID NO: 885 - protein, 7 aa, synthetic construct
  REGION 1..7: note = n-mer motif
KSQSEDV

SEQ ID NO: 886 - DNA, 21 bp, synthetic construct
  misc_feature 1..21: note = n-mer motif encoding polynucleotide
  source 1..21: mol_type = other DNA
aagagtcagtctgaggatgtg

SEQ ID NO: 887 - protein, 7 aa, synthetic construct
  REGION 1..7: note = n-mer motif
LLYGYSS

SEQ ID NO: 888 - DNA, 21 bp, synthetic construct
  misc_feature 1..21: note = n-mer motif encoding polynucleotide
  source 1..21: mol_type = other DNA
ctcctctacggatactcttca

SEQ ID NO: 889 - protein, 7 aa, synthetic construct
  REGION 1..7: note = n-mer motif
MVQSGLT

SEQ ID NO: 890 - DNA, 21 bp, synthetic construct
  misc_feature 1..21: note = n-mer motif encoding polynucleotide
  source 1..21: mol_type = other DNA
atggttcagtcggggttgacg

SEQ ID NO: 891 - protein, 7 aa, synthetic construct
  REGION 1..7: note = n-mer motif
EQYLGSP

SEQ ID NO: 892 - DNA, 21 bp, synthetic construct
  misc_feature 1..21: note = n-mer motif encoding polynucleotide
  source 1..21: mol_type = other DNA
gagcagtatctgggttctccg

SEQ ID NO: 893 - protein, 7 aa, synthetic construct
  REGION 1..7: note = n-mer motif
SGANLSN

SEQ ID NO: 894 - DNA, 21 bp, synthetic construct
  misc_feature 1..21: note = n-mer motif encoding polynucleotide
  source 1..21: mol_type = other DNA
tcgggggctaacctctcgaac

SEQ ID NO: 895 - protein, 7 aa, synthetic construct
  REGION 1..7: note = n-mer motif
ALVQNGV

SEQ ID NO: 896 - DNA, 21 bp, synthetic construct
  misc_feature 1..21: note = n-mer motif encoding polynucleotide
  source 1..21: mol_type = other DNA
gctttggtgcagaatggtgtt

SEQ ID NO: 897 - protein, 7 aa, synthetic construct
  REGION 1..7: note = n-mer motif
SDQQKVW

SEQ ID NO: 898 - DNA, 21 bp, synthetic construct
  misc_feature 1..21: note = n-mer motif encoding polynucleotide
  source 1..21: mol_type = other DNA
agtgatcagcagaaggtttgg

SEQ ID NO: 899 - protein, 7 aa, synthetic construct
  REGION 1..7: note = n-mer motif
NGSDTPK

SEQ ID NO: 900 - DNA, 21 bp, synthetic construct
  misc_feature 1..21: note = n-mer motif encoding polynucleotide
  source 1..21: mol_type = other DNA
aacggaagcgacacaccgaaa

SEQ ID NO: 901 - protein, 7 aa, synthetic construct
  REGION 1..7: note = n-mer motif
SDLTSYV

SEQ ID NO: 902 - DNA, 21 bp, synthetic construct
  misc_feature 1..21: note = n-mer motif encoding polynucleotide
  source 1..21: mol_type = other DNA
tccgacctcaccagttacgtt

SEQ ID NO: 903 - protein, 7 aa, synthetic construct
  REGION 1..7: note = n-mer motif
GAADRQI

SEQ ID NO: 904 - DNA, 21 bp, synthetic construct
  misc_feature 1..21: note = n-mer motif encoding polynucleotide
  source 1..21: mol_type = other DNA
ggtgcggctgataggcagatt

SEQ ID NO: 905 - protein, 7 aa, synthetic construct
  REGION 1..7: note = n-mer motif
AVGHVSG

SEQ ID NO: 906 - DNA, 21 bp, synthetic construct
  misc_feature 1..21: note = n-mer motif encoding polynucleotide
  source 1..21: mol_type = other DNA
gccgtaggacacgtttctggt

SEQ ID NO: 907 - protein, 7 aa, synthetic construct
  REGION 1..7: note = n-mer motif
RYISDSA

SEQ ID NO: 908 - DNA, 21 bp, synthetic construct
  misc_feature 1..21: note = n-mer motif encoding polynucleotide
  source 1..21: mol_type = other DNA
aggtatatttcggattctgcg

SEQ ID NO: 909 - protein, 7 aa, synthetic construct
  REGION 1..7: note = n-mer motif
AQGTISR

SEQ ID NO: 910 - DNA, 21 bp, synthetic construct
  misc_feature 1..21: note = n-mer motif encoding polynucleotide
  source 1..21: mol_type = other DNA
gcgcaggggacgatttcgcgt

SEQ ID NO: 911 - protein, 7 aa, synthetic construct
  REGION 1..7: note = n-mer motif
MANMLSD

SEQ ID NO: 912 - DNA, 21 bp, synthetic construct
  misc_feature 1..21: note = n-mer motif encoding polynucleotide
  source 1..21: mol_type = other DNA
atggcgaacatgttatctgac

SEQ ID NO: 913 - protein, 7 aa, synthetic construct
  REGION 1..7: note = n-mer motif
VMRDKDE

SEQ ID NO: 914 - DNA, 21 bp, synthetic construct
  misc_feature 1..21: note = n-mer motif encoding polynucleotide
  source 1..21: mol_type = other DNA
gtgatgcgtgataaggatgag

SEQ ID NO: 915 - protein, 7 aa, synthetic construct
  REGION 1..7: note = n-mer motif
GGKGEGP

SEQ ID NO: 916 - DNA, 21 bp, synthetic construct
  misc_feature 1..21: note = n-mer motif encoding polynucleotide
  source 1..21: mol_type = other DNA
ggtgggaagggtgagggtccg

SEQ ID NO: 917 - protein, 7 aa, synthetic construct
  REGION 1..7: note = n-mer motif
SDVVVTH

SEQ ID NO: 918 - DNA, 21 bp, synthetic construct
  misc_feature 1..21: note = n-mer motif encoding polynucleotide
  source 1..21: mol_type = other DNA
tctgatgttgttgttactcat

SEQ ID NO: 919 - protein, 7 aa, synthetic construct
  REGION 1..7: note = n-mer motif
GVLTTVT

SEQ ID NO: 920 - DNA, 21 bp, synthetic construct
  misc_feature 1..21: note = n-mer motif encoding polynucleotide
  source 1..21: mol_type = other DNA
ggggttcttactacggtgact

SEQ ID NO: 921 - protein, 7 aa, synthetic construct
  REGION 1..7: note = n-mer motif
NDGPREQ

SEQ ID NO: 922 - DNA, 21 bp, synthetic construct
  misc_feature 1..21: note = n-mer motif encoding polynucleotide
  source 1..21: mol_type = other DNA
aatgatggtccgagggagcag

SEQ ID NO: 923 - protein, 7 aa, synthetic construct
  REGION 1..7: note = n-mer motif
PTQGVSM

SEQ ID NO: 924 - DNA, 21 bp, synthetic construct
  misc_feature 1..21: note = n-mer motif encoding polynucleotide
  source 1..21: mol_type = other DNA
ccaacccaaggagtttcgatg

SEQ ID NO: 925 - protein, 7 aa, synthetic construct
  REGION 1..7: note = n-mer motif
NMGVVQL

SEQ ID NO: 926 - DNA, 21 bp, synthetic construct
  misc_feature 1..21: note = n-mer motif encoding polynucleotide
  source 1..21: mol_type = other DNA
aacatgggcgtcgtgcaattg

SEQ ID NO: 927 - protein, 7 aa, synthetic construct
  REGION 1..7: note = n-mer motif
AGGGDPR

SEQ ID NO: 928 - DNA, 21 bp, synthetic construct
  misc_feature 1..21: note = n-mer motif encoding polynucleotide
  source 1..21: mol_type = other DNA
gcggggggtggggatccgagg

SEQ ID NO: 929 - protein, 7 aa, synthetic construct
  REGION 1..7: note = n-mer motif
AGVVNAL

SEQ ID NO: 930 - DNA, 21 bp, synthetic construct
  misc_feature 1..21: note = n-mer motif encoding polynucleotide
  source 1..21: mol_type = other DNA
gcgggggtggtgaatgctttg

SEQ ID NO: 931 - protein, 7 aa, synthetic construct
  REGION 1..7: note = n-mer motif
ANPVGNV

SEQ ID NO: 932 - DNA, 21 bp, synthetic construct
  misc_feature 1..21: note = n-mer motif encoding polynucleotide
  source 1..21: mol_type = other DNA
gcgaatcctgttgggaatgtt

SEQ ID NO: 933 - protein, 7 aa, synthetic construct
  REGION 1..7: note = n-mer motif
VQGTQTG

SEQ ID NO: 934 - DNA, 21 bp, synthetic construct
  misc_feature 1..21: note = n-mer motif encoding polynucleotide
  source 1..21: mol_type = other DNA
gtgcagggtacgcagactggt

SEQ ID NO: 935 - protein, 7 aa, synthetic construct
  REGION 1..7: note = n-mer motif
SPGFSIA

SEQ ID NO: 936 - DNA, 21 bp, synthetic construct
  misc_feature 1..21: note = n-mer motif encoding polynucleotide
  source 1..21: mol_type = other DNA
tctcctggattcagcatcgct

SEQ ID NO: 937 - protein, 7 aa, synthetic construct
  REGION 1..7: note = n-mer motif
AIERLTV

SEQ ID NO: 938 - DNA, 21 bp, synthetic construct
  misc_feature 1..21: note = n-mer motif encoding polynucleotide
  source 1..21: mol_type = other DNA
gcaatcgaaagactaaccgtt

SEQ ID NO: 939 - protein, 7 aa, synthetic construct
  REGION 1..7: note = n-mer motif
TDKQNAF

SEQ ID NO: 940 - DNA, 21 bp, synthetic construct
  misc_feature 1..21: note = n-mer motif encoding polynucleotide
  source 1..21: mol_type = other DNA
acggacaaacaaaacgcattc

SEQ ID NO: 941 - protein, 7 aa, synthetic construct
  REGION 1..7: note = n-mer motif
LADSKDR

SEQ ID NO: 942 - DNA, 21 bp, synthetic construct
  misc_feature 1..21: note = n-mer motif encoding polynucleotide
  source 1..21: mol_type = other DNA
ctggcagactcgaaagacagg

SEQ ID NO: 943 - protein, 7 aa, synthetic construct
  REGION 1..7: note = n-mer motif
VHSTGEW

SEQ ID NO: 944 - DNA, 21 bp, synthetic construct
  misc_feature 1..21: note = n-mer motif encoding polynucleotide
  source 1..21: mol_type = other DNA
gtacacagcacaggcgaatgg

SEQ ID NO: 945 - protein, 7 aa, synthetic construct
  REGION 1..7: note = n-mer motif
LHNALAV

SEQ ID NO: 946 - DNA, 21 bp, synthetic construct
  misc_feature 1..21: note = n-mer motif encoding polynucleotide
  source 1..21: mol_type = other DNA
ctgcataatgctctggctgtt

SEQ ID NO: 947 - protein, 7 aa, synthetic construct
  REGION 1..7: note = n-mer motif
IGLDPKA

SEQ ID NO: 948 - DNA, 21 bp, synthetic construct
  misc_feature 1..21: note = n-mer motif encoding polynucleotide
  source 1..21: mol_type = other DNA
attggtttggatccgaaggcg

SEQ ID NO: 949 - protein, 7 aa, synthetic construct
  REGION 1..7: note = n-mer motif
VMASTGP

SEQ ID NO: 950 - DNA, 21 bp, synthetic construct
  misc_feature 1..21: note = n-mer motif encoding polynucleotide
  source 1..21: mol_type = other DNA
gttatggcttcgactggtcct

SEQ ID NO: 951 - protein, 7 aa, synthetic construct
  REGION 1..7: note = n-mer motif
SVPGTVS

SEQ ID NO: 952 - DNA, 21 bp, synthetic construct
  misc_feature 1..21: note = n-mer motif encoding polynucleotide
  source 1..21: mol_type = other DNA
agtgtgccggggactgtgtct

SEQ ID NO: 953 - protein, 7 aa, synthetic construct
  REGION 1..7: note = n-mer motif
MLSNGQV

SEQ ID NO: 954 - DNA, 21 bp, synthetic construct
  misc_feature 1..21: note = n-mer motif encoding polynucleotide
  source 1..21: mol_type = other DNA
atgctgtctaatgggcaggtt

SEQ ID NO: 955 - protein, 7 aa, synthetic construct
  REGION 1..7: note = n-mer motif
ASTATLR

SEQ ID NO: 956 - DNA, 21 bp, synthetic construct
  misc_feature 1..21: note = n-mer motif encoding polynucleotide
  source 1..21: mol_type = other DNA
gcgtctactgctactcttcgg

SEQ ID NO: 957 - protein, 7 aa, synthetic construct
  REGION 1..7: note = n-mer motif
PGEHYQG

SEQ ID NO: 958 - DNA, 21 bp, synthetic construct
  misc_feature 1..21: note = n-mer motif encoding polynucleotide
  source 1..21: mol_type = other DNA
ccgggtgagcattatcagggt

SEQ ID NO: 959 - protein, 7 aa, synthetic construct
  REGION 1..7: note = n-mer motif
QVTDNKT

SEQ ID NO: 960 - DNA, 21 bp, synthetic construct
  misc_feature 1..21: note = n-mer motif encoding polynucleotide
  source 1..21: mol_type = other DNA
caggtgactgataataagact

SEQ ID NO: 961 - protein, 7 aa, synthetic construct
  REGION 1..7: note = n-mer motif
NGLQVSI

SEQ ID NO: 962 - DNA, 21 bp, synthetic construct
  misc_feature 1..21: note = n-mer motif encoding polynucleotide
  source 1..21: mol_type = other DNA
aacggactacaagtgtctatc

SEQ ID NO: 963 - protein, 7 aa, synthetic construct
  REGION 1..7: note = n-mer motif
SHPGNEL

SEQ ID NO: 964 - DNA, 21 bp, synthetic construct
  misc_feature 1..21: note = n-mer motif encoding polynucleotide
  source 1..21: mol_type = other DNA
agccaccccggcaacgaactc

SEQ ID NO: 965 - protein, 7 aa, synthetic construct
  REGION 1..7: note = n-mer motif
VSLNGGH

SEQ ID NO: 966 - DNA, 21 bp, synthetic construct
  misc_feature 1..21: note = n-mer motif encoding polynucleotide
  source 1..21: mol_type = other DNA
gtgtcgcttaatggggggcat

SEQ ID NO: 967 - protein, 7 aa, synthetic construct
  REGION 1..7: note = n-mer motif
MVASSID

SEQ ID NO: 968 - DNA, 21 bp, synthetic construct
  misc_feature 1..21: note = n-mer motif encoding polynucleotide
  source 1..21: mol_type = other DNA
atggtggcttcatccatagac

SEQ ID NO: 969 - protein, 7 aa, synthetic construct
  REGION 1..7: note = n-mer motif
MGVNTTI

SEQ ID NO: 970 - DNA, 21 bp, synthetic construct
  misc_feature 1..21: note = n-mer motif encoding polynucleotide
  source 1..21: mol_type = other DNA
atgggggtgaatacgactatt

SEQ ID NO: 971 - protein, 7 aa, synthetic construct
  REGION 1..7: note = n-mer motif
MNGGHLM

SEQ ID NO: 972 - DNA, 21 bp, synthetic construct
  misc_feature 1..21: note = n-mer motif encoding polynucleotide
  source 1..21: mol_type = other DNA
atgaatgggggtcatcttatg

SEQ ID NO: 973 - protein, 7 aa, synthetic construct
  REGION 1..7: note = n-mer motif
LGSDGRT

SEQ ID NO: 974 - DNA, 21 bp, synthetic construct
  misc_feature 1..21: note = n-mer motif encoding polynucleotide
  source 1..21: mol_type = other DNA
cttggctcagacggccgaacc

SEQ ID NO: 975 - protein, 7 aa, synthetic construct
  REGION 1..7: note = n-mer motif
RVDTPQL

SEQ ID NO: 976 - DNA, 21 bp, synthetic construct
  misc_feature 1..21: note = n-mer motif encoding polynucleotide
  source 1..21: mol_type = other DNA
cgagtcgacacaccacaattg

SEQ ID NO: 977 - protein, 7 aa, synthetic construct
  REGION 1..7: note = n-mer motif
TEQAKLS

SEQ ID NO: 978 - DNA, 21 bp, synthetic construct
  misc_feature 1..21: note = n-mer motif encoding polynucleotide
  source 1..21: mol_type = other DNA
actgaacaagccaaactatct

SEQ ID NO: 979 - protein, 7 aa, synthetic construct
  REGION 1..7: note = n-mer motif
IGTNSTY

SEQ ID NO: 980 - DNA, 21 bp, synthetic construct
  misc_feature 1..21: note = n-mer motif encoding polynucleotide
  source 1..21: mol_type = other DNA
attggtacgaatagtacgtat

SEQ ID NO: 981 - protein, 7 aa, synthetic construct
  REGION 1..7: note = n-mer motif
LSESANR

SEQ ID NO: 982 - DNA, 21 bp, synthetic construct
  misc_feature 1..21: note = n-mer motif encoding polynucleotide
  source 1..21: mol_type = other DNA
ttgtcggagagtgcgaatcgt

SEQ ID NO: 983 - protein, 7 aa, synthetic construct
  REGION 1..7: note = n-mer motif
GQSSNQH

SEQ ID NO: 984 - DNA, 21 bp, synthetic construct
  misc_feature 1..21: note = n-mer motif encoding polynucleotide
  source 1..21: mol_type = other DNA
gggcagtcgtctaatcagcat

SEQ ID NO: 985 - protein, 7 aa, synthetic construct
  REGION 1..7: note = n-mer motif
MRSEQTT

SEQ ID NO: 986 - DNA, 21 bp, synthetic construct
  misc_feature 1..21: note = n-mer motif encoding polynucleotide
  source 1..21: mol_type = other DNA
atgcgtagtgagcagacgacg

SEQ ID NO: 987 - protein, 7 aa, synthetic construct
  REGION 1..7: note = n-mer motif
AGISTQT

SEQ ID NO: 988 - DNA, 21 bp, synthetic construct
  misc_feature 1..21: note = n-mer motif encoding polynucleotide
  source 1..21: mol_type = other DNA
gcggggattagtactcagacg

SEQ ID NO: 989 - protein, 7 aa, synthetic construct
  REGION 1..7: note = n-mer motif
TGESNVG

SEQ ID NO: 990 - DNA, 21 bp, synthetic construct
  misc_feature 1..21: note = n-mer motif encoding polynucleotide
  source 1..21: mol_type = other DNA
actggggagagtaatgttggt

SEQ ID NO: 991 - protein, 7 aa, synthetic construct
  REGION 1..7: note = n-mer motif
ALANVSN

SEQ ID NO: 992 - DNA, 21 bp, synthetic construct
  misc_feature 1..21: note = n-mer motif encoding polynucleotide
  source 1..21: mol_type = other DNA
gcgcttgccaacgtttccaac

SEQ ID NO: 993 - protein, 7 aa, synthetic construct
  REGION 1..7: note = n-mer motif
SFGMVVD

SEQ ID NO: 994 - DNA, 21 bp, synthetic construct
  misc_feature 1..21: note = n-mer motif encoding polynucleotide
  source 1..21: mol_type = other DNA
tcgttcggcatggtagtcgac

SEQ ID NO: 995 - protein, 7 aa, synthetic construct
  REGION 1..7: note = n-mer motif
TMSHAEL

SEQ ID NO: 996 - DNA, 21 bp, synthetic construct
  misc_feature 1..21: note = n-mer motif encoding polynucleotide
  source 1..21: mol_type = other DNA
accatgtcgcacgcagaatta

SEQ ID NO: 997 - protein, 7 aa, synthetic construct
  REGION 1..7: note = n-mer motif
LSNMVSA

SEQ ID NO: 998 - DNA, 21 bp, synthetic construct
  misc_feature 1..21: note = n-mer motif encoding polynucleotide
  source 1..21: mol_type = other DNA
ttgagtaatatggtgagtgct

SEQ ID NO: 999 - protein, 7 aa, synthetic construct
  REGION 1..7: note = n-mer motif
HGTLVSR

SEQ ID NO: 1000 - DNA, 21 bp, synthetic construct
  misc_feature 1..21: note = n-mer motif encoding polynucleotide
  source 1..21: mol_type = other DNA
catgggactttggtgtctcgg

SEQ ID NO: 1001 - protein, 7 aa, synthetic construct
  REGION 1..7: note = n-mer motif
VAVTGAI

SEQ ID NO: 1002 - DNA, 21 bp, synthetic construct
  misc_feature 1..21: note = n-mer motif encoding polynucleotide
  source 1..21: mol_type = other DNA
gttgcggtgactggtgctatt

SEQ ID NO: 1003 - protein, 7 aa, synthetic construct
  REGION 1..7: note = n-mer motif
IMVDAHA

SEQ ID NO: 1004 - DNA, 21 bp, synthetic construct
  misc_feature 1..21: note = n-mer motif encoding polynucleotide
  source 1..21: mol_type = other DNA
attatggttgatgctcatgcg

SEQ ID NO: 1005 - protein, 7 aa, synthetic construct
  REGION 1..7: note = n-mer motif
TPTLPFI

SEQ ID NO: 1006 - DNA, 21 bp, synthetic construct
  misc_feature 1..21: note = n-mer motif encoding polynucleotide
  source 1..21: mol_type = other DNA
acgcctacgttgccttttatt

SEQ ID NO: 1007 - protein, 7 aa, synthetic construct
  REGION 1..7: note = n-mer motif
GIAGLGI

SEQ ID NO: 1008 - DNA, 21 bp, synthetic construct
  misc_feature 1..21: note = n-mer motif encoding polynucleotide
  source 1..21: mol_type = other DNA
ggtattgctgggcttgggatt

SEQ ID NO: 1009 - protein, 7 aa, synthetic construct
  REGION 1..7: note = n-mer motif
SSLPDKT

SEQ ID NO: 1010 - DNA, 21 bp, synthetic construct
  misc_feature 1..21: note = n-mer motif encoding polynucleotide
  source 1..21: mol_type = other DNA
tcatccctaccggacaaaacc

SEQ ID NO: 1011 - protein, 7 aa, synthetic construct
  REGION 1..7: note = n-mer motif
QSQTALR

SEQ ID NO: 1012 - DNA, 21 bp, synthetic construct
  misc_feature 1..21: note = n-mer motif encoding polynucleotide
  source 1..21: mol_type = other DNA
caatcccaaacagcattgcga

SEQ ID NO: 1013 - protein, 7 aa, synthetic construct
  REGION 1..7: note = n-mer motif
AVGNELL

SEQ ID NO: 1014 - DNA, 21 bp, synthetic construct
  misc_feature 1..21: note = n-mer motif encoding polynucleotide
  source 1..21: mol_type = other DNA
gccgttggcaacgaactgctg

SEQ ID NO: 1015 - protein, 7 aa, synthetic construct
  REGION 1..7: note = n-mer motif
GSGAGVA

SEQ ID NO: 1016 - DNA, 21 bp, synthetic construct
  misc_feature 1..21: note = n-mer motif encoding polynucleotide
  source 1..21: mol_type = other DNA
gggagcggcgccggtgtagcc

SEQ ID NO: 1017 - protein, 7 aa, synthetic construct
  REGION 1..7: note = n-mer motif
ESGLINV

SEQ ID NO: 1018 - DNA, 21 bp, synthetic construct
  misc_feature 1..21: note = n-mer motif encoding polynucleotide
  source 1..21: mol_type = other DNA
gagtcgggtctgattaatgtg

SEQ ID NO: 1019 - protein, 7 aa, synthetic construct
  REGION 1..7: note = n-mer motif
PNAGFDR

SEQ ID NO: 1020 - DNA, 21 bp, synthetic construct
  misc_feature 1..21: note = n-mer motif encoding polynucleotide
  source 1..21: mol_type = other DNA
ccgaacgcggggttcgaccgt

SEQ ID NO: 1021 - protein, 7 aa, synthetic construct
  REGION 1..7: note = n-mer motif
LNQGLGD

SEQ ID NO: 1022 - DNA, 21 bp, synthetic construct
  misc_feature 1..21: note = n-mer motif encoding polynucleotide
  source 1..21: mol_type = other DNA
ctgaatcaggggttgggggat

SEQ ID NO: 1023 - protein, 7 aa, synthetic construct
  REGION 1..7: note = n-mer motif
ALASVGV

SEQ ID NO: 1024 - DNA, 21 bp, synthetic construct
  misc_feature 1..21: note = n-mer motif encoding polynucleotide
  source 1..21: mol_type = other DNA
gcgttggcatccgtgggtgtc

SEQ ID NO: 1025 - protein, 7 aa, synthetic construct
  REGION 1..7: note = n-mer motif
SEGPSRY

SEQ ID NO: 1026 - DNA, 21 bp, synthetic construct
  misc_feature 1..21: note = n-mer motif encoding polynucleotide
  source 1..21: mol_type = other DNA
tcggagggtccttcgcgttat

SEQ ID NO: 1027 - protein, 7 aa, synthetic construct
  REGION 1..7: note = n-mer motif
SYGDGGV

SEQ ID NO: 1028 - DNA, 21 bp, synthetic construct
  misc_feature 1..21: note = n-mer motif encoding polynucleotide
  source 1..21: mol_type = other DNA
tcgtatggtgatggtggtgtt

SEQ ID NO: 1029 - protein, 7 aa, synthetic construct
  REGION 1..7: note = n-mer motif
LGHNSGV

SEQ ID NO: 1030 - DNA, 21 bp, synthetic construct
  misc_feature 1..21: note = n-mer motif encoding polynucleotide
  source 1..21: mol_type = other DNA
ttggggcataattctggtgtt

SEQ ID NO: 1031 - protein, 7 aa, synthetic construct
  REGION 1..7: note = n-mer motif
SSPNVGP

SEQ ID NO: 1032 - DNA, 21 bp, synthetic construct
  misc_feature 1..21: note = n-mer motif encoding polynucleotide
  source 1..21: mol_type = other DNA
tcttctccgaacgtcggtcct

SEQ ID NO: 1033 - protein, 7 aa, synthetic construct
  REGION 1..7: note = n-mer motif
VSGTSTH

SEQ ID NO: 1034 - DNA, 21 bp, synthetic construct
  misc_feature 1..21: note = n-mer motif encoding polynucleotide
  source 1..21: mol_type = other DNA
gtttcgggtacttctacgcat

SEQ ID NO: 1035 - protein, 7 aa, synthetic construct
  REGION 1..7: note = n-mer motif
SEGGNNR

SEQ ID NO: 1036 - DNA, 21 bp, synthetic construct
  misc_feature 1..21: note = n-mer motif encoding polynucleotide
  source 1..21: mol_type = other DNA
agtgagggtgggaataatcgg

SEQ ID NO: 1037 - protein, 7 aa, synthetic construct
  REGION 1..7: note = n-mer motif
SGASLSN

SEQ ID NO: 1038 - DNA, 21 bp, synthetic construct
  misc_feature 1..21: note = n-mer motif encoding polynucleotide
  source 1..21: mol_type = other DNA
tccggagcatccctttccaac

SEQ ID NO: 1039 - protein, 7 aa, synthetic construct
  REGION 1..7: note = n-mer motif
SNGVPSS

SEQ ID NO: 1040 - DNA, 21 bp, synthetic construct
  misc_feature 1..21: note = n-mer motif encoding polynucleotide
  source 1..21: mol_type = other DNA
agcaacggagtaccgtcatcg

SEQ ID NO: 1041 - protein, 7 aa, synthetic construct
  REGION 1..7: note = n-mer motif
ESGTHLS

SEQ ID NO: 1042 - DNA, 21 bp, synthetic construct
  misc_feature 1..21: note = n-mer motif encoding polynucleotide
  source 1..21: mol_type = other DNA
gagtctgggactcatttgtcg

SEQ ID NO: 1043 - protein, 7 aa, synthetic construct
  REGION 1..7: note = n-mer motif
VTVQVQR

SEQ ID NO: 1044 - DNA, 21 bp, synthetic construct
  misc_feature 1..21: note = n-mer motif encoding polynucleotide
  source 1..21: mol_type = other DNA
gttacggtgcaggtgcagagg

SEQ ID NO: 1045 - protein, 7 aa, synthetic construct
  REGION 1..7: note = n-mer motif
ASESTPR

SEQ ID NO: 1046 - DNA, 21 bp, synthetic construct
  misc_feature 1..21: note = n-mer motif encoding polynucleotide
  source 1..21: mol_type = other DNA
gctagtgagtctacgccgcgt

SEQ ID NO: 1047 - protein, 7 aa, synthetic construct
  REGION 1..7: note = n-mer motif
LVTFRAD

SEQ ID NO: 1048 - DNA, 21 bp, synthetic construct
  misc_feature 1..21: note = n-mer motif encoding polynucleotide
  source 1..21: mol_type = other DNA
cttgttacttttcgtgcggat

SEQ ID NO: 1049 - protein, 7 aa, synthetic construct
  REGION 1..7: note = n-mer motif
LTQMSNK

SEQ ID NO: 1050 - DNA, 21 bp, synthetic construct
  misc_feature 1..21: note = n-mer motif encoding polynucleotide
  source 1..21: mol_type = other DNA
ctgactcagatgagtaataag

SEQ ID NO: 1051 - protein, 7 aa, synthetic construct
  REGION 1..7: note = n-mer motif
AVEGSRL

SEQ ID NO: 1052 - DNA, 21 bp, synthetic construct
  misc_feature 1..21: note = n-mer motif encoding polynucleotide
  source 1..21: mol_type = other DNA
gcggtggagggttcgaggctg

SEQ ID NO: 1053 - protein, 7 aa, synthetic construct
  REGION 1..7: note = n-mer motif
PNERINV

SEQ ID NO: 1054 - DNA, 21 bp, synthetic construct
  misc_feature 1..21: note = n-mer motif encoding polynucleotide
  source 1..21: mol_type = other DNA
ccgaatgagaggattaatgtg

SEQ ID NO: 1055 - protein, 7 aa, synthetic construct
  REGION 1..7: note = n-mer motif
GDHDRGS

SEQ ID NO: 1056 - DNA, 21 bp, synthetic construct
  misc_feature 1..21: note = n-mer motif encoding polynucleotide
  source 1..21: mol_type = other DNA
ggagaccacgacaggggctcg

SEQ ID NO: 1057 - protein, 7 aa, synthetic construct
  REGION 1..7: note = n-mer motif
RHQVSES

SEQ ID NO: 1058 - DNA, 21 bp, synthetic construct
  misc_feature 1..21: note = n-mer motif encoding polynucleotide
  source 1..21: mol_type = other DNA
cgtcatcaggttagtgagagt

SEQ ID NO: 1059 - protein, 7 aa, synthetic construct
  REGION 1..7: note = n-mer motif
LDGLNLH

SEQ ID NO: 1060 - DNA, 21 bp, synthetic construct
  misc_feature 1..21: note = n-mer motif encoding polynucleotide
  source 1..21: mol_type = other DNA
ctagacggcttgaacctccac

SEQ ID NO: 1061 - protein, 7 aa, synthetic construct
  REGION 1..7: note = n-mer motif
PGNGTLV

SEQ ID NO: 1062 - DNA, 21 bp, synthetic construct
  misc_feature 1..21: note = n-mer motif encoding polynucleotide
  source 1..21: mol_type = other DNA
ccggggaatgggacgttggtt

SEQ ID NO: 1063 - protein, 7 aa, synthetic construct
  REGION 1..7: note = n-mer motif
DSYGGNA

SEQ ID NO: 1064 - DNA, 21 bp, synthetic construct
  misc_feature 1..21: note = n-mer motif encoding polynucleotide
  source 1..21: mol_type = other DNA
gactcgtacggggggaacgcc

SEQ ID NO: 1065 - protein, 7 aa, synthetic construct
  REGION 1..7: note = n-mer motif
LHKGSES

SEQ ID NO: 1066 - DNA, 21 bp, synthetic construct
  misc_feature 1..21: note = n-mer motif encoding polynucleotide
  source 1..21: mol_type = other DNA
cttcataagggtagtgagagt

SEQ ID NO: 1067 - protein, 7 aa, synthetic construct
  REGION 1..7: note = n-mer motif
SVDIVKL

SEQ ID NO: 1068 - DNA, 21 bp, synthetic construct
  misc_feature 1..21: note = n-mer motif encoding polynucleotide
  source 1..21: mol_type = other DNA
tcggttgatattgtgaagctt

SEQ ID NO: 1069 - protein, 7 aa, synthetic construct
  REGION 1..7: note = n-mer motif
HTLSTGV

SEQ ID NO: 1070 - DNA, 21 bp, synthetic construct
  misc_feature 1..21: note = n-mer motif encoding polynucleotide
  source 1..21: mol_type = other DNA
catacgctgagtactggggtg

SEQ ID NO: 1071 - protein, 7 aa, synthetic construct
  REGION 1..7: note = n-mer motif
SQINSGS

SEQ ID NO: 1072 - DNA, 21 bp, synthetic construct
  misc_feature 1..21: note = n-mer motif encoding polynucleotide
  source 1..21: mol_type = other DNA
tcccaaataaactctggcagc

SEQ ID NO: 1073 - protein, 7 aa, synthetic construct
  REGION 1..7: note = n-mer motif
ALSGLDK

SEQ ID NO: 1074 - DNA, 21 bp, synthetic construct
  misc_feature 1..21: note = n-mer motif encoding polynucleotide
  source 1..21: mol_type = other DNA
gccctgagtgggctagacaaa

SEQ ID NO: 1075 - protein, 7 aa, synthetic construct
  REGION 1..7: note = n-mer motif
RNSESEA

SEQ ID NO: 1076 - DNA, 21 bp, synthetic construct
  misc_feature 1..21: note = n-mer motif encoding polynucleotide
  source 1..21: mol_type = other DNA
cgaaacagcgaatcggaagcg

SEQ ID NO: 1077 - protein, 7 aa, synthetic construct
  REGION 1..7: note = n-mer motif
PNERHTL

SEQ ID NO: 1078 - DNA, 21 bp, synthetic construct
  misc_feature 1..21: note = n-mer motif encoding polynucleotide
  source 1..21: mol_type = other DNA
cctaacgaacgccacaccttg

SEQ ID NO: 1079 - protein, 7 aa, synthetic construct
  REGION 1..7: note = n-mer motif
VNAGLGI

SEQ ID NO: 1080 - DNA, 21 bp, synthetic construct
  misc_feature 1..21: note = n-mer motif encoding polynucleotide
  source 1..21: mol_type = other DNA
gtaaacgccggcttgggcatc

SEQ ID NO: 1081 - protein, 7 aa, synthetic construct
  REGION 1..7: note = n-mer motif
PASGALT

SEQ ID NO: 1082 - DNA, 21 bp, synthetic construct
  misc_feature 1..21: note = n-mer motif encoding polynucleotide
  source 1..21: mol_type = other DNA
ccggcttcgggtgctcttact

SEQ ID NO: 1083 - protein, 7 aa, synthetic construct
  REGION 1..7: note = n-mer motif
SAMVTSP

SEQ ID NO: 1084 - DNA, 21 bp, synthetic construct
  misc_feature 1..21: note = n-mer motif encoding polynucleotide
  source 1..21: mol_type = other DNA
tcagccatggttacctcgcca

SEQ ID NO: 1085 - protein, 7 aa, synthetic construct
  REGION 1..7: note = n-mer motif
DSHVSGK

SEQ ID NO: 1086 - DNA, 21 bp, synthetic construct
  misc_feature 1..21: note = n-mer motif encoding polynucleotide
  source 1..21: mol_type = other DNA
gactcacacgtcagtggaaaa

SEQ ID NO: 1087 - protein, 7 aa, synthetic construct
  REGION 1..7: note = n-mer motif
SPQGALA

SEQ ID NO: 1088 - DNA, 21 bp, synthetic construct
  misc_feature 1..21: note = n-mer motif encoding polynucleotide
  source 1..21: mol_type = other DNA
tcgccgcagggggctcttgct

SEQ ID NO: 1089 - protein, 7 aa, synthetic construct
  REGION 1..7: note = n-mer motif
GDNPAVA

SEQ ID NO: 1090 - DNA, 21 bp, synthetic construct
  misc_feature 1..21: note = n-mer motif encoding polynucleotide
  source 1..21: mol_type = other DNA
ggtgataatcctgcggtggct

SEQ ID NO: 1091 - protein, 7 aa, synthetic construct
  REGION 1..7: note = n-mer motif
KEIHVSV

SEQ ID NO: 1092 - DNA, 21 bp, synthetic construct
  misc_feature 1..21: note = n-mer motif encoding polynucleotide
  source 1..21: mol_type = other DNA
aaagaaatccacgtttctgtg

SEQ ID NO: 1093 - protein, 7 aa, synthetic construct
  REGION 1..7: note = n-mer motif
VTTVSTV

SEQ ID NO: 1094 - DNA, 21 bp, synthetic construct
  misc_feature 1..21: note = n-mer motif encoding polynucleotide
  source 1..21: mol_type = other DNA
gtgactacggtttctactgtg

SEQ ID NO: 1095 - protein, 7 aa, synthetic construct
  REGION 1..7: note = n-mer motif
WTDGVSR

SEQ ID NO: 1096 - DNA, 21 bp, synthetic construct
  misc_feature 1..21: note = n-mer motif encoding polynucleotide
  source 1..21: mol_type = other DNA
tggactgatggggtgtcgcgg

SEQ ID NO: 1097 - protein, 7 aa, synthetic construct
  REGION 1..7: note = n-mer motif
AADSSAR

SEQ ID NO: 1098 - DNA, 21 bp, synthetic construct
  misc_feature 1..21: note = n-mer motif encoding polynucleotide
  source 1..21: mol_type = other DNA
gcggcggatagttctgcgcgg

SEQ ID NO: 1099 - protein, 7 aa, synthetic construct
  REGION 1..7: note = n-mer motif
LDNRTMK

SEQ ID NO: 1100 - DNA, 21 bp, synthetic construct
  misc_feature 1..21: note = n-mer motif encoding polynucleotide
  source 1..21: mol_type = other DNA
cttgataatcgtactatgaag

SEQ ID NO: 1101 - protein, 7 aa, synthetic construct
  REGION 1..7: note = n-mer motif
DVADSKR

SEQ ID NO: 1102 - DNA, 21 bp, synthetic construct
  misc_feature 1..21: note = n-mer motif encoding polynucleotide
  source 1..21: mol_type = other DNA
gatgttgctgattctaagcgt

SEQ ID NO: 1103 - protein, 7 aa, synthetic construct
  REGION 1..7: note = n-mer motif
SVGGTIH

SEQ ID NO: 1104 - DNA, 21 bp, synthetic construct
  misc_feature 1..21: note = n-mer motif encoding polynucleotide
  source 1..21: mol_type = other DNA
tcggttggtggtacgattcat

SEQ ID NO: 1105 - protein, 7 aa, synthetic construct
  REGION 1..7: note = n-mer motif
PLTAGVS

SEQ ID NO: 1106 - DNA, 21 bp, synthetic construct
  misc_feature 1..21: note = n-mer motif encoding polynucleotide
  source 1..21: mol_type = other DNA
cctctgacggcgggggtgtcg

SEQ ID NO: 1107 - protein, 7 aa, synthetic construct
  REGION 1..7: note = n-mer motif
AADISVR

SEQ ID NO: 1108 - DNA, 21 bp, synthetic construct
  misc_feature 1..21: note = n-mer motif encoding polynucleotide
  source 1..21: mol_type = other DNA
gcagcagacatatcagtccgc

SEQ ID NO: 1109 - protein, 7 aa, synthetic construct
  REGION 1..7: note = n-mer motif
YADSHTD

SEQ ID NO: 1110 - DNA, 21 bp, synthetic construct
  misc_feature 1..21: note = n-mer motif encoding polynucleotide
  source 1..21: mol_type = other DNA
tacgccgacagccacacagac

SEQ ID NO: 1111 - protein, 7 aa, synthetic construct
  REGION 1..7: note = n-mer motif
VDVNLTR

SEQ ID NO: 1112 - DNA, 21 bp, synthetic construct
  misc_feature 1..21: note = n-mer motif encoding polynucleotide
  source 1..21: mol_type = other DNA
gtcgacgtaaacttaacaaga

SEQ ID NO: 1113 - protein, 7 aa, synthetic construct
  REGION 1..7: note = n-mer motif
AIAEYQV

SEQ ID NO: 1114 - DNA, 21 bp, synthetic construct
  misc_feature 1..21: note = n-mer motif encoding polynucleotide
  source 1..21: mol_type = other DNA
gcgattgcggagtatcaggtg

SEQ ID NO: 1115 - protein, 7 aa, synthetic construct
  REGION 1..7: note = n-mer motif
SRVDGSG

SEQ ID NO: 1116 - DNA, 21 bp, synthetic construct
  misc_feature 1..21: note = n-mer motif encoding polynucleotide
  source 1..21: mol_type = other DNA
tcgcgtgttgatggttcgggt

SEQ ID NO: 1117 - protein, 7 aa, synthetic construct
  REGION 1..7: note = n-mer motif
HGDGVRV

SEQ ID NO: 1118 - DNA, 21 bp, synthetic construct
  misc_feature 1..21: note = n-mer motif encoding polynucleotide
  source 1..21: mol_type = other DNA
cacggggacggagtacgcgtc

SEQ ID NO: 1119 - protein, 7 aa, synthetic construct
  REGION 1..7: note = n-mer motif
HESRDHS

SEQ ID NO: 1120 - DNA, 21 bp, synthetic construct
  misc_feature 1..21: note = n-mer motif encoding polynucleotide
  source 1..21: mol_type = other DNA
cacgaatcgagagaccacagt

SEQ ID NO: 1121 - protein, 7 aa, synthetic construct
  REGION 1..7: note = n-mer motif
RYEQNTP

SEQ ID NO: 1122 - DNA, 21 bp, synthetic construct
  misc_feature 1..21: note = n-mer motif encoding polynucleotide
  source 1..21: mol_type = other DNA
aggtacgaacaaaacactccc

SEQ ID NO: 1123 - protein, 7 aa, synthetic construct
  REGION 1..7: note = n-mer motif
ALASTQT

SEQ ID NO: 1124 - DNA, 21 bp, synthetic construct
  misc_feature 1..21: note = n-mer motif encoding polynucleotide
  source 1..21: mol_type = other DNA
gcgttggcgagtactcagacg

SEQ ID NO: 1125 - protein, 7 aa, synthetic construct
  REGION 1..7: note = n-mer motif
FSSERLP

SEQ ID NO: 1126 - DNA, 21 bp, synthetic construct
  misc_feature 1..21: note = n-mer motif encoding polynucleotide
  source 1..21: mol_type = other DNA
ttttcgtctgagcggcttccg

SEQ ID NO: 1127 - protein, 7 aa, synthetic construct
  REGION 1..7: note = n-mer motif
TTTHEGV

SEQ ID NO: 1128 - DNA, 21 bp, synthetic construct
  misc_feature 1..21: note = n-mer motif encoding polynucleotide
  source 1..21: mol_type = other DNA
acgacgactcatgagggggtg

SEQ ID NO: 1129 - protein, 7 aa, synthetic construct
  REGION 1..7: note = n-mer motif
RMDSAQL

SEQ ID NO: 1130 - DNA, 21 bp, synthetic construct
  misc_feature 1..21: note = n-mer motif encoding polynucleotide
  source 1..21: mol_type = other DNA
aggatggattcggcgcagctt

SEQ ID NO: 1131 - protein, 7 aa, synthetic construct
  REGION 1..7: note = n-mer motif
SHGPDSK

SEQ ID NO: 1132 - DNA, 21 bp, synthetic construct
  misc_feature 1..21: note = n-mer motif encoding polynucleotide
  source 1..21: mol_type = other DNA
tctcatggtcctgattcgaag

SEQ ID NO: 1133 - protein, 7 aa, synthetic construct
  REGION 1..7: note = n-mer motif
SVATGVL

SEQ ID NO: 1134 - DNA, 21 bp, synthetic construct
  misc_feature 1..21: note = n-mer motif encoding polynucleotide
  source 1..21: mol_type = other DNA
tcggttgcgacgggggttctg

SEQ ID NO: 1135 - protein, 7 aa, synthetic construct
  REGION 1..7: note = n-mer motif
LLASGAK

SEQ ID NO: 1136 - DNA, 21 bp, synthetic construct
  misc_feature 1..21: note = n-mer motif encoding polynucleotide
  source 1..21: mol_type = other DNA
ctgcttgcgagtggggctaag

SEQ ID NO: 1137 - protein, 7 aa, synthetic construct
  REGION 1..7: note = n-mer motif
ASLGAYS

SEQ ID NO: 1138 - DNA, 21 bp, synthetic construct
  misc_feature 1..21: note = n-mer motif encoding polynucleotide
  source 1..21: mol_type = other DNA
gcgtcgcttggggcgtattcg

SEQ ID NO: 1139 - protein, 7 aa, synthetic construct
  REGION 1..7: note = n-mer motif
KELLVSA

SEQ ID NO: 1140 - DNA, 21 bp, synthetic construct
  misc_feature 1..21: note = n-mer motif encoding polynucleotide
  source 1..21: mol_type = other DNA
aaagaactcttagtaagtgca

SEQ ID NO: 1141 - protein, 7 aa, synthetic construct
  REGION 1..7: note = n-mer motif
SLGVAVA

SEQ ID NO: 1142 - DNA, 21 bp, synthetic construct
  misc_feature 1..21: note = n-mer motif encoding polynucleotide
  source 1..21: mol_type = other DNA
agtttaggtgtcgccgtcgcc

SEQ ID NO: 1143 - protein, 7 aa, synthetic construct
  REGION 1..7: note = n-mer motif
VSGSISK

SEQ ID NO: 1144 - DNA, 21 bp, synthetic construct
  misc_feature 1..21: note = n-mer motif encoding polynucleotide
  source 1..21: mol_type = other DNA
gtttcggggagtatttctaag

SEQ ID NO: 1145 - protein, 7 aa, synthetic construct
  REGION 1..7: note = n-mer motif
TTSGQTM

SEQ ID NO: 1146 - DNA, 21 bp, synthetic construct
  misc_feature 1..21: note = n-mer motif encoding polynucleotide
  source 1..21: mol_type = other DNA
accacttccggtcaaacaatg

SEQ ID NO: 1147 - protein, 7 aa, synthetic construct
  REGION 1..7: note = n-mer motif
QTVGPLN

SEQ ID NO: 1148 - DNA, 21 bp, synthetic construct
  misc_feature 1..21: note = n-mer motif encoding polynucleotide
  source 1..21: mol_type = other DNA
caaacagtaggaccgttaaac

SEQ ID NO: 1149 - protein, 7 aa, synthetic construct
  REGION 1..7: note = n-mer motif
VNGNNTY

SEQ ID NO: 1150 - DNA, 21 bp, synthetic construct
  misc_feature 1..21: note = n-mer motif encoding polynucleotide
  source 1..21: mol_type = other DNA
gtaaacggcaacaacacctac

SEQ ID NO: 1151 - protein, 7 aa, synthetic construct
  REGION 1..7: note = n-mer motif
VAEGGGV

SEQ ID NO: 1152 - DNA, 21 bp, synthetic construct
  misc_feature 1..21: note = n-mer motif encoding polynucleotide
  source 1..21: mol_type = other DNA
gtagccgaaggcggtggcgtc

SEQ ID NO: 1153 - protein, 7 aa, synthetic construct
  REGION 1..7: note = n-mer motif
GSGENVR

SEQ ID NO: 1154 - DNA, 21 bp, synthetic construct
  misc_feature 1..21: note = n-mer motif encoding polynucleotide
  source 1..21: mol_type = other DNA
ggctctggcgaaaacgtaagg

SEQ ID NO: 1155 - protein, 7 aa, synthetic construct
  REGION 1..7: note = n-mer motif
AADSSMR

SEQ ID NO: 1156 - DNA, 21 bp, synthetic construct
  misc_feature 1..21: note = n-mer motif encoding polynucleotide
  source 1..21: mol_type = other DNA
gcggcggatagttctatgcgg

SEQ ID NO: 1157 - protein, 7 aa, synthetic construct
  REGION 1..7: note = n-mer motif
LDGLNLH

SEQ ID NO: 1158 - DNA, 21 bp, synthetic construct
  misc_feature 1..21: note = n-mer motif encoding polynucleotide
  source 1..21: mol_type = other DNA
ctggatgggctgaatcttcat

SEQ ID NO: 1159 - protein, 7 aa, synthetic construct
  REGION 1..7: note = n-mer motif
MAGALGP

SEQ ID NO: 1160 - DNA, 21 bp, synthetic construct
  misc_feature 1..21: note = n-mer motif encoding polynucleotide
  source 1..21: mol_type = other DNA
atggcaggtgcactgggtccc

SEQ ID NO: 1161 - protein, 7 aa, synthetic construct
  REGION 1..7: note = n-mer motif
GLNEHGA

SEQ ID NO: 1162 - DNA, 21 bp, synthetic construct
  misc_feature 1..21: note = n-mer motif encoding polynucleotide
  source 1..21: mol_type = other DNA
ggtctgaatgagcatggggcg

SEQ ID NO: 1163 - protein, 7 aa, synthetic construct
  REGION 1..7: note = n-mer motif
LLSSENR

SEQ ID NO: 1164 - DNA, 21 bp, synthetic construct
  misc_feature 1..21: note = n-mer motif encoding polynucleotide
  source 1..21: mol_type = other DNA
ctcttgtcttctgaaaaccgg

SEQ ID NO: 1165 - protein, 7 aa, synthetic construct
  REGION 1..7: note = n-mer motif
RDVSGHI

SEQ ID NO: 1166 - DNA, 21 bp, synthetic construct
  misc_feature 1..21: note = n-mer motif encoding polynucleotide
  source 1..21: mol_type = other DNA
agggatgtgtcggggcatatt

SEQ ID NO: 1167 - protein, 7 aa, synthetic construct
  REGION 1..7: note = n-mer motif
GDQAMVN

SEQ ID NO: 1168 - DNA, 21 bp, synthetic construct
  misc_feature 1..21: note = n-mer motif encoding polynucleotide
  source 1..21: mol_type = other DNA
ggggatcaggctatggttaat

SEQ ID NO: 1169 - protein, 7 aa, synthetic construct
  REGION 1..7: note = n-mer motif
AHVDVKV

SEQ ID NO: 1170 - DNA, 21 bp, synthetic construct
  misc_feature 1..21: note = n-mer motif encoding polynucleotide
  source 1..21: mol_type = other DNA
gcccacgtagacgtaaaagtt

SEQ ID NO: 1171 - protein, 7 aa, synthetic construct
  REGION 1..7: note = n-mer motif
ALANSER

SEQ ID NO: 1172 - DNA, 21 bp, synthetic construct
  misc_feature 1..21: note = n-mer motif encoding polynucleotide
  source 1..21: mol_type = other DNA
gctttggcgaattctgagcgg

SEQ ID NO: 1173 - protein, 7 aa, synthetic construct
  REGION 1..7: note = n-mer motif
KGSDTTI

SEQ ID NO: 1174 - DNA, 21 bp, synthetic construct
  misc_feature 1..21: note = n-mer motif encoding polynucleotide
  source 1..21: mol_type = other DNA
aagggttctgatactactatt

SEQ ID NO: 1175 - protein, 7 aa, synthetic construct
  REGION 1..7: note = n-mer motif
VAQGSVV

SEQ ID NO: 1176 - DNA, 21 bp, synthetic construct
  misc_feature 1..21: note = n-mer motif encoding polynucleotide
  source 1..21: mol_type = other DNA
gtggctcaggggtcggttgtt

SEQ ID NO: 1177 - protein, 7 aa, synthetic construct
  REGION 1..7: note = n-mer motif
GFEDGAR

SEQ ID NO: 1178 - DNA, 21 bp, synthetic construct
  misc_feature 1..21: note = n-mer motif encoding polynucleotide
  source 1..21: mol_type = other DNA
ggcttcgaagacggtgctcga

SEQ ID NO: 1179 - protein, 7 aa, synthetic construct
  REGION 1..7: note = n-mer motif
QADNHVR

SEQ ID NO: 1180 - DNA, 21 bp, synthetic construct
  misc_feature 1..21: note = n-mer motif encoding polynucleotide
  source 1..21: mol_type = other DNA
caggcggataatcatgttagg

SEQ ID NO: 1181 - protein, 7 aa, synthetic construct
  REGION 1..7: note = n-mer motif
RHADSTV

SEQ ID NO: 1182 - DNA, 21 bp, synthetic construct
  misc_feature 1..21: note = n-mer motif encoding polynucleotide
  source 1..21: mol_type = other DNA
cgtcatgctgattctacggtt

SEQ ID NO: 1183 - protein, 7 aa, synthetic construct
  REGION 1..7: note = n-mer motif
PMSQGEL

SEQ ID NO: 1184 - DNA, 21 bp, synthetic construct
  misc_feature 1..21: note = n-mer motif encoding polynucleotide
  source 1..21: mol_type = other DNA
ccgatgagtcagggggagttg

SEQ ID NO: 1185 - protein, 7 aa, synthetic construct
  REGION 1..7: note = n-mer motif
GNSGGHV

SEQ ID NO: 1186 - DNA, 21 bp, synthetic construct
  misc_feature 1..21: note = n-mer motif encoding polynucleotide
  source 1..21: mol_type = other DNA
gggaatagtgggggtcatgtt

SEQ ID NO: 1187 - protein, 7 aa, synthetic construct
  REGION 1..7: note = n-mer motif
RNQAEEM

SEQ ID NO: 1188 - DNA, 21 bp, synthetic construct
  misc_feature 1..21: note = n-mer motif encoding polynucleotide
  source 1..21: mol_type = other DNA
agaaaccaagctgaagaaatg

SEQ ID NO: 1189 - protein, 7 aa, synthetic construct
  REGION 1..7: note = n-mer motif
LLSSENR

SEQ ID NO: 1190 - DNA, 21 bp, synthetic construct
  misc_feature 1..21: note = n-mer motif encoding polynucleotide
  source 1..21: mol_type = other DNA
cttctgtcgtcggagaatagg

SEQ ID NO: 1191 - protein, 7 aa, synthetic construct
  REGION 1..7: note = n-mer motif
GFEGGTR

SEQ ID NO: 1192 - DNA, 21 bp, synthetic construct
  misc_feature 1..21: note = n-mer motif encoding polynucleotide
  source 1..21: mol_type = other DNA
gggttcgaaggcggcactcga

SEQ ID NO: 1193 - protein, 7 aa, synthetic construct
  REGION 1..7: note = n-mer motif
GGGSESY

SEQ ID NO: 1194 - DNA, 21 bp, synthetic construct
  misc_feature 1..21: note = n-mer motif encoding polynucleotide
  source 1..21: mol_type = other DNA
ggaggggggtcagaatcatac

SEQ ID NO: 1195 - protein, 7 aa, synthetic construct
  REGION 1..7: note = n-mer motif
EAASAIS

SEQ ID NO: 1196 - DNA, 21 bp, synthetic construct
  misc_feature 1..21: note = n-mer motif encoding polynucleotide
  source 1..21: mol_type = other DNA
gaagcggcatcagccatatcc

SEQ ID NO: 1197 - protein, 7 aa, synthetic construct
  REGION 1..7: note = n-mer motif
LTTPIEL

SEQ ID NO: 1198 - DNA, 21 bp, synthetic construct
  misc_feature 1..21: note = n-mer motif encoding polynucleotide
  source 1..21: mol_type = other DNA
ttgacgactccgattgagttg

SEQ ID NO: 1199 - protein, 7 aa, synthetic construct
  REGION 1..7: note = n-mer motif
RTMSVML

SEQ ID NO: 1200 - DNA, 21 bp, synthetic construct
  misc_feature 1..21: note = n-mer motif encoding polynucleotide
  source 1..21: mol_type = other DNA
cgcaccatgtctgtcatgctg

SEQ ID NO: 1201 - protein, 7 aa, synthetic construct
  REGION 1..7: note = n-mer motif
GIHETRA

SEQ ID NO: 1202 - DNA, 21 bp, synthetic construct
  misc_feature 1..21: note = n-mer motif encoding polynucleotide
  source 1..21: mol_type = other DNA
ggcatccacgaaacacgggca

SEQ ID NO: 1203 - protein, 7 aa, synthetic construct
  REGION 1..7: note = n-mer motif
SEGHSSY

SEQ ID NO: 1204 - DNA, 21 bp, synthetic construct
  misc_feature 1..21: note = n-mer motif encoding polynucleotide
  source 1..21: mol_type = other DNA
tcggagggtcattcgagttat

SEQ ID NO: 1205 - protein, 7 aa, synthetic construct
  REGION 1..7: note = n-mer motif
SVSDVKH

SEQ ID NO: 1206 - DNA, 21 bp, synthetic construct
  misc_feature 1..21: note = n-mer motif encoding polynucleotide
  source 1..21: mol_type = other DNA
agtgtctcggacgtcaaacac

SEQ ID NO: 1207 - protein, 7 aa, synthetic construct
  REGION 1..7: note = n-mer motif
LSVSQSA

SEQ ID NO: 1208 - DNA, 21 bp, synthetic construct
  misc_feature 1..21: note = n-mer motif encoding polynucleotide
  source 1..21: mol_type = other DNA
ctctccgtcagtcaatctgct

SEQ ID NO: 1209 - protein, 7 aa, synthetic construct
  REGION 1..7: note = n-mer motif
VVKEYES

SEQ ID NO: 1210 - DNA, 21 bp, synthetic construct
  misc_feature 1..21: note = n-mer motif encoding polynucleotide
  source 1..21: mol_type = other DNA
gtagtcaaagaatacgaaagc

SEQ ID NO: 1211 - protein, 7 aa, synthetic construct
  REGION 1..7: note = n-mer motif
RVGAEGT

SEQ ID NO: 1212 - DNA, 21 bp, synthetic construct
  misc_feature 1..21: note = n-mer motif encoding polynucleotide
  source 1..21: mol_type = other DNA
cgggttggggcggaggggacg

SEQ ID NO: 1213 - protein, 7 aa, synthetic construct
  REGION 1..7: note = n-mer motif
QAGLGVI

SEQ ID NO: 1214 - DNA, 21 bp, synthetic construct
  misc_feature 1..21: note = n-mer motif encoding polynucleotide
  source 1..21: mol_type = other DNA
caggctggtcttggtgttatt

SEQ ID NO: 1215 - protein, 7 aa, synthetic construct
  REGION 1..7: note = n-mer motif
RVHSTDT

SEQ ID NO: 1216 - DNA, 21 bp, synthetic construct
  misc_feature 1..21: note = n-mer motif encoding polynucleotide
  source 1..21: mol_type = other DNA
cgagtccactcgaccgacacg

SEQ ID NO: 1217 - protein, 7 aa, synthetic construct
  REGION 1..7: note = n-mer motif
VATESAF

SEQ ID NO: 1218 - DNA, 21 bp, synthetic construct
  misc_feature 1..21: note = n-mer motif encoding polynucleotide
  source 1..21: mol_type = other DNA
gtggcaaccgaatcagcattc

SEQ ID NO: 1219 - protein, 7 aa, synthetic construct
  REGION 1..7: note = n-mer motif
SNGAGYL

SEQ ID NO: 1220 - DNA, 21 bp, synthetic construct
  misc_feature 1..21: note = n-mer motif encoding polynucleotide
  source 1..21: mol_type = other DNA
tcgaatggggcgggttatctt

SEQ ID NO: 1221 - protein, 7 aa, synthetic construct
  REGION 1..7: note = n-mer motif
VGEGNKF

SEQ ID NO: 1222 - DNA, 21 bp, synthetic construct
  misc_feature 1..21: note = n-mer motif encoding polynucleotide
  source 1..21: mol_type = other DNA
gtgggtgaggggaataagttt

SEQ ID NO: 1223 - protein, 7 aa, synthetic construct
  REGION 1..7: note = n-mer motif
DVRGSVI

SEQ ID NO: 1224 - DNA, 21 bp, synthetic construct
  misc_feature 1..21: note = n-mer motif encoding polynucleotide
  source 1..21: mol_type = other DNA
gatgtgaggggttcggttatt

SEQ ID NO: 1225 - protein, 7 aa, synthetic construct
  REGION 1..7: note = n-mer motif
PLDGQGK

SEQ ID NO: 1226 - DNA, 21 bp, synthetic construct
  misc_feature 1..21: note = n-mer motif encoding polynucleotide
  source 1..21: mol_type = other DNA
ccgctagacggccaaggcaaa

SEQ ID NO: 1227 - protein, 7 aa, synthetic construct
  REGION 1..7: note = n-mer motif
ASVSSQL

SEQ ID NO: 1228 - DNA, 21 bp, synthetic construct
  misc_feature 1..21: note = n-mer motif encoding polynucleotide
  source 1..21: mol_type = other DNA
gccagcgtcagctcacaactc

SEQ ID NO: 1229 - protein, 7 aa, synthetic construct
  REGION 1..7: note = n-mer motif
LAKEESH

SEQ ID NO: 1230 - DNA, 21 bp, synthetic construct
  misc_feature 1..21: note = n-mer motif encoding polynucleotide
  source 1..21: mol_type = other DNA
cttgctaaggaggagtcgcat

SEQ ID NO: 1231 - protein, 7 aa, synthetic construct
  REGION 1..7: note = n-mer motif
FTHGTGT

SEQ ID NO: 1232 - DNA, 21 bp, synthetic construct
  misc_feature 1..21: note = n-mer motif encoding polynucleotide
  source 1..21: mol_type = other DNA
ttcacgcacggcactgggacg

SEQ ID NO: 1233 - protein, 7 aa, synthetic construct
  REGION 1..7: note = n-mer motif
ASVSSQS

SEQ ID NO: 1234 - DNA, 21 bp, synthetic construct
  misc_feature 1..21: note = n-mer motif encoding polynucleotide
  source 1..21: mol_type = other DNA
gcctcggtctcgagtcaatca

SEQ ID NO: 1235 - protein, 7 aa, synthetic construct
  REGION 1..7: note = n-mer motif
GVADNVK

SEQ ID NO: 1236 - DNA, 21 bp, synthetic construct
  misc_feature 1..21: note = n-mer motif encoding polynucleotide
  source 1..21: mol_type = other DNA
ggtgtcgcagacaacgtcaaa

SEQ ID NO: 1237 - protein, 7 aa, synthetic construct
  REGION 1..7: note = n-mer motif
SAGVPGV

SEQ ID NO: 1238 - DNA, 21 bp, synthetic construct
  misc_feature 1..21: note = n-mer motif encoding polynucleotide
  source 1..21: mol_type = other DNA
tcggctggagtacctggagtc

SEQ ID NO: 1239 - protein, 7 aa, synthetic construct
  REGION 1..7: note = n-mer motif
SDSTVVG

SEQ ID NO: 1240 - DNA, 21 bp, synthetic construct
  misc_feature 1..21: note = n-mer motif encoding polynucleotide
  source 1..21: mol_type = other DNA
tctgatagtactgttgtgggg

SEQ ID NO: 1241 - protein, 7 aa, synthetic construct
  REGION 1..7: note = n-mer motif
FAGIAQA

SEQ ID NO: 1242 - DNA, 21 bp, synthetic construct
  misc_feature 1..21: note = n-mer motif encoding polynucleotide
  source 1..21: mol_type = other DNA
tttgcggggattgcgcaggcg

SEQ ID NO: 1243 - protein, 7 aa, synthetic construct
  REGION 1..7: note = n-mer motif
QSDLGRV

SEQ ID NO: 1244 - DNA, 21 bp, synthetic construct
  misc_feature 1..21: note = n-mer motif encoding polynucleotide
  source 1..21: mol_type = other DNA
cagtcggatcttgggagggtg

SEQ ID NO: 1245 - protein, 7 aa, synthetic construct
  REGION 1..7: note = n-mer motif
PLQNNPH

SEQ ID NO: 1246 - DNA, 21 bp, synthetic construct
  misc_feature 1..21: note = n-mer motif encoding polynucleotide
  source 1..21: mol_type = other DNA
ccgcttcagaataatccgcat

SEQ ID NO: 1247 - protein, 7 aa, synthetic construct
  REGION 1..7: note = n-mer motif
PGTNSFS

SEQ ID NO: 1248 - DNA, 21 bp, synthetic construct
  misc_feature 1..21: note = n-mer motif encoding polynucleotide
  source 1..21: mol_type = other DNA
cccggaaccaacagtttctct

SEQ ID NO: 1249 - protein, 7 aa, synthetic construct
  REGION 1..7: note = n-mer motif
QEQGTST

SEQ ID NO: 1250 - DNA, 21 bp, synthetic construct
  misc_feature 1..21: note = n-mer motif encoding polynucleotide
  source 1..21: mol_type = other DNA
caagaacaaggcacttcgacg

SEQ ID NO: 1251 - protein, 7 aa, synthetic construct
  REGION 1..7: note = n-mer motif
RSEVNGV

SEQ ID NO: 1252 - DNA, 21 bp, synthetic construct
  misc_feature 1..21: note = n-mer motif encoding polynucleotide
  source 1..21: mol_type = other DNA
cgttcagaagtaaacggtgtc

SEQ ID NO: 1253 - protein, 7 aa, synthetic construct
  REGION 1..7: note = n-mer motif
LTDKMTS

SEQ ID NO: 1254 - DNA, 21 bp, synthetic construct
  misc_feature 1..21: note = n-mer motif encoding polynucleotide
  source 1..21: mol_type = other DNA
ttgactgataagatgacgtcg

SEQ ID NO: 1255 - protein, 7 aa, synthetic construct
  REGION 1..7: note = n-mer motif
GGTISGP

SEQ ID NO: 1256 - DNA, 21 bp, synthetic construct
  misc_feature 1..21: note = n-mer motif encoding polynucleotide
  source 1..21: mol_type = other DNA
gggggtacgattagtggtcct

SEQ ID NO: 1257 - protein, 7 aa, synthetic construct
  REGION 1..7: note = n-mer motif
ADGKGAI

SEQ ID NO: 1258 - DNA, 21 bp, synthetic construct
  misc_feature 1..21: note = n-mer motif encoding polynucleotide
  source 1..21: mol_type = other DNA
gcggatgggaagggtgcgatt

SEQ ID NO: 1259 - protein, 7 aa, synthetic construct
  REGION 1..7: note = n-mer motif
RTGDTIS

SEQ ID NO: 1260 - DNA, 21 bp, synthetic construct
  misc_feature 1..21: note = n-mer motif
  source 1..21: mol_type = other DNA
cggacgggcgacacaatcagt

SEQ ID NO: 1261 - protein, 7 aa, synthetic construct
  REGION 1..7: note = n-mer motif encoding polynucleotide
PMSPGVA

SEQ ID NO: 1262 - DNA, 21 bp, synthetic construct
  misc_feature 1..21: note = n-mer motif encoding polynucleotide
  source 1..21: mol_type = other DNA
ccgatgtctccgggggtggct

SEQ ID NO: 1263 - protein, 7 aa, synthetic construct
  REGION 1..7: note = n-mer motif
SVMTDRP

SEQ ID NO: 1264 - DNA, 21 bp, synthetic construct
  misc_feature 1..21: note = n-mer motif encoding polynucleotide
  source 1..21: mol_type = other DNA
tcggtgatgaccgacagacct

SEQ ID NO: 1265 - protein, 7 aa, synthetic construct
  REGION 1..7: note = n-mer motif
PTEGTLR

SEQ ID NO: 1266 - DNA, 21 bp, synthetic construct
  misc_feature 1..21: note = n-mer motif encoding polynucleotide
  source 1..21: mol_type = other DNA
cctactgaggggacgcttcgg

SEQ ID NO: 1267 - protein, 7 aa, synthetic construct
  REGION 1..7: note = n-mer motif
ASGTGMT

SEQ ID NO: 1268 - DNA, 21 bp, synthetic construct
  misc_feature 1..21: note = n-mer motif encoding polynucleotide
  source 1..21: mol_type = other DNA
gcctcagggaccggcatgacg

SEQ ID NO: 1269 - protein, 7 aa, synthetic construct
  REGION 1..7: note = n-mer motif
SANPVAR

SEQ ID NO: 1270 - DNA, 21 bp, synthetic construct
  misc_feature 1..21: note = n-mer motif encoding polynucleotide
  source 1..21: mol_type = other DNA
agcgctaaccccgtagctcgg

SEQ ID NO: 1271 - protein, 7 aa, synthetic construct
  REGION 1..7: note = n-mer motif
AAGVNLN

SEQ ID NO: 1272 - DNA, 21 bp, synthetic construct
  misc_feature 1..21: note = n-mer motif encoding polynucleotide
  source 1..21: mol_type = other DNA
gcggcgggtgttaatctgaat

SEQ ID NO: 1273 - protein, 7 aa, synthetic construct
  REGION 1..7: note = n-mer motif
TNQVITH

SEQ ID NO: 1274 - DNA, 21 bp, synthetic construct
  misc_feature 1..21: note = n-mer motif encoding polynucleotide
  source 1..21: mol_type = other DNA
acaaaccaagtaataactcac

SEQ ID NO: 1275 - protein, 7 aa, synthetic construct
  REGION 1..7: note = n-mer motif
PLINGLV

SEQ ID NO: 1276 - DNA, 21 bp, synthetic construct
  misc_feature 1..21: note = n-mer motif encoding polynucleotide
  source 1..21: mol_type = other DNA
cctttgattaatgggctggtg

SEQ ID NO: 1277 - protein, 7 aa, synthetic construct
  REGION 1..7: note = n-mer motif
KSHSENN

SEQ ID NO: 1278 - DNA, 21 bp, synthetic construct
  misc_feature 1..21: note = n-mer motif encoding polynucleotide
  source 1..21: mol_type = other DNA
aagtcgcattcggagaataat

SEQ ID NO: 1279 - protein, 7 aa, synthetic construct
  REGION 1..7: note = n-mer motif
MNGGHVK

SEQ ID NO: 1280 - DNA, 21 bp, synthetic construct
  misc_feature 1..21: note = n-mer motif encoding polynucleotide
  source 1..21: mol_type = other DNA
atgaatgggggtcatgttaag

SEQ ID NO: 1281 - protein, 7 aa, synthetic construct
  REGION 1..7: note = n-mer motif
LAGTLVQ

SEQ ID NO: 1282 - DNA, 21 bp, synthetic construct
  misc_feature 1..21: note = n-mer motif encoding polynucleotide
  source 1..21: mol_type = other DNA
ttggcaggaaccctagtacaa

SEQ ID NO: 1283 - protein, 7 aa, synthetic construct
  REGION 1..7: note = n-mer motif
PLKGGGE

SEQ ID NO: 1284 - DNA, 21 bp, synthetic construct
  misc_feature 1..21: note = n-mer motif encoding polynucleotide
  source 1..21: mol_type = other DNA
cctctgaagggtggtggggag

SEQ ID NO: 1285 - protein, 7 aa, synthetic construct
  REGION 1..7: note = n-mer motif
VVNSSSS

SEQ ID NO: 1286 - DNA, 21 bp, synthetic construct
  misc_feature 1..21: note = n-mer motif encoding polynucleotide
  source 1..21: mol_type = other DNA
gtagtgaactcctcttcttcc

SEQ ID NO: 1287 - protein, 7 aa, synthetic construct
  REGION 1..7: note = n-mer motif
SKADAYS

SEQ ID NO: 1288 - DNA, 21 bp, synthetic construct
  misc_feature 1..21: note = n-mer motif encoding polynucleotide
  source 1..21: mol_type = other DNA
tcgaaggctgatgcttatagt

SEQ ID NO: 1289 - protein, 7 aa, synthetic construct
  REGION 1..7: note = n-mer motif
MIGDVSP

SEQ ID NO: 1290 - DNA, 21 bp, synthetic construct
  misc_feature 1..21: note = n-mer motif encoding polynucleotide
  source 1..21: mol_type = other DNA
atgatcggagacgtaagtcct

SEQ ID NO: 1291 - protein, 7 aa, synthetic construct
  REGION 1..7: note = n-mer motif
LDSSRFH

SEQ ID NO: 1292 - DNA, 21 bp, synthetic construct
  misc_feature 1..21: note = n-mer motif encoding polynucleotide
  source 1..21: mol_type = other DNA
ctggatagttcgcgttttcat

SEQ ID NO: 1293 - protein, 7 aa, synthetic construct
  REGION 1..7: note = n-mer motif
GLMSNAK

SEQ ID NO: 1294 - DNA, 21 bp, synthetic construct
  misc_feature 1..21: note = n-mer motif encoding polynucleotide
  source 1..21: mol_type = other DNA
ggactcatgagtaacgcaaaa

SEQ ID NO: 1295 - protein, 7 aa, synthetic construct
  REGION 1..7: note = n-mer motif
PSVGMAT

SEQ ID NO: 1296 - DNA, 21 bp, synthetic construct
  misc_feature 1..21: note = n-mer motif encoding polynucleotide
  source 1..21: mol_type = other DNA
ccttcagttggcatggcgact

SEQ ID NO: 1297 - protein, 7 aa, synthetic construct
  REGION 1..7: note = n-mer motif
SSEGRNV

SEQ ID NO: 1298 - DNA, 21 bp, synthetic construct
  misc_feature 1..21: note = n-mer motif encoding polynucleotide
  source 1..21: mol_type = other DNA
agtagtgagggtcgtaatgtg

SEQ ID NO: 1299 - protein, 7 aa, synthetic construct
  REGION 1..7: note = n-mer motif
LQEQLAG

SEQ ID NO: 1300 - DNA, 21 bp, synthetic construct
  misc_feature 1..21: note = n-mer motif encoding polynucleotide
  source 1..21: mol_type = other DNA
cttcaggagcagcttgctggg

SEQ ID NO: 1301 - protein, 7 aa, synthetic construct
  REGION 1..7: note = n-mer motif
VGVPLGR

SEQ ID NO: 1302 - DNA, 21 bp, synthetic construct
  misc_feature 1..21: note = n-mer motif encoding polynucleotide
  source 1..21: mol_type = other DNA
gtgggtgtgccgcttggtcgg

SEQ ID NO: 1303 - protein, 7 aa, synthetic construct
  REGION 1..7: note = n-mer motif
AGASAEA

SEQ ID NO: 1304 - DNA, 21 bp, synthetic construct
  misc_feature 1..21: note = n-mer motif encoding polynucleotide
  source 1..21: mol_type = other DNA
gctggggctagtgctgaggcg

SEQ ID NO: 1305 - protein, 7 aa, synthetic construct
  REGION 1..7: note = n-mer motif
VNSSENK

SEQ ID NO: 1306 - DNA, 21 bp, synthetic construct
  misc_feature 1..21: note = n-mer motif encoding polynucleotide
  source 1..21: mol_type = other DNA
gtgaacagctccgaaaacaaa

SEQ ID NO: 1307 - protein, 7 aa, synthetic construct
  REGION 1..7: note = n-mer motif
INGRNDI

SEQ ID NO: 1308 - DNA, 21 bp, synthetic construct
  misc_feature 1..21: note = n-mer motif encoding polynucleotide
  source 1..21: mol_type = other DNA
ataaacggccggaacgacatc

SEQ ID NO: 1309 - protein, 7 aa, synthetic construct
  REGION 1..7: note = n-mer motif
VMASTGP

SEQ ID NO: 1310 - DNA, 21 bp, synthetic construct
  misc_feature 1..21: note = n-mer motif encoding polynucleotide
  source 1..21: mol_type = other DNA
gtaatggcgtcaacaggaccg

SEQ ID NO: 1311 - protein, 7 aa, synthetic construct
  REGION 1..7: note = n-mer motif
AASEVYV

SEQ ID NO: 1312 - DNA, 21 bp, synthetic construct
  misc_feature 1..21: note = n-mer motif encoding polynucleotide
  source 1..21: mol_type = other DNA
gctgcttctgaggtttatgtt

SEQ ID NO: 1313 - protein, 7 aa, synthetic construct
  REGION 1..7: note = n-mer motif
RNNVDST

SEQ ID NO: 1314 - DNA, 21 bp, synthetic construct
  misc_feature 1..21: note = n-mer motif encoding polynucleotide
  source 1..21: mol_type = other DNA
cgcaacaacgtagacagtact

SEQ ID NO: 1315 - protein, 7 aa, synthetic construct
  REGION 1..7: note = n-mer motif
LDASKLV

SEQ ID NO: 1316 - DNA, 21 bp, synthetic construct
  misc_feature 1..21: note = n-mer motif encoding polynucleotide
  source 1..21: mol_type = other DNA
ctcgacgcatccaaattggtt

SEQ ID NO: 1317 - protein, 7 aa, synthetic construct
  REGION 1..7: note = n-mer motif
AGDSSVR

SEQ ID NO: 1318 - DNA, 21 bp, synthetic construct
  misc_feature 1..21: note = n-mer motif encoding polynucleotide
  source 1..21: mol_type = other DNA
gctggtgactcaagtgtacgt

SEQ ID NO: 1319 - protein, 7 aa, synthetic construct
  REGION 1..7: note = n-mer motif
SGSNTGP

SEQ ID NO: 1320 - DNA, 21 bp, synthetic construct
  misc_feature 1..21: note = n-mer motif encoding polynucleotide
  source 1..21: mol_type = other DNA
tcggggtctaatacgggtcct

SEQ ID NO: 1321 - protein, 7 aa, synthetic construct
  REGION 1..7: note = n-mer motif
GTLERTA

SEQ ID NO: 1322 - DNA, 21 bp, synthetic construct
  misc_feature 1..21: note = n-mer motif encoding polynucleotide
  source 1..21: mol_type = other DNA
ggtactcttgagaggactgct

SEQ ID NO: 1323 - protein, 7 aa, synthetic construct
  REGION 1..7: note = n-mer motif
KLTSEMT

SEQ ID NO: 1324 - DNA, 21 bp, synthetic construct
  misc_feature 1..21: note = n-mer motif encoding polynucleotide
  source 1..21: mol_type = other DNA
aaattaacatccgaaatgacc

SEQ ID NO: 1325 - protein, 7 aa, synthetic construct
  REGION 1..7: note = n-mer motif
DATTKSM

SEQ ID NO: 1326 - DNA, 21 bp, synthetic construct
  misc_feature 1..21: note = n-mer motif encoding polynucleotide
  source 1..21: mol_type = other DNA
gacgccacaactaaatccatg

SEQ ID NO: 1327 - protein, 7 aa, synthetic construct
  REGION 1..7: note = n-mer motif
GLAGRVV

SEQ ID NO: 1328 - DNA, 21 bp, synthetic construct
  misc_feature 1..21: note = n-mer motif encoding polynucleotide
  source 1..21: mol_type = other DNA
gggttggcggggcgtgttgtt

SEQ ID NO: 1329 - protein, 7 aa, synthetic construct
  REGION 1..7: note = n-mer motif
AAGGIMN

SEQ ID NO: 1330 - DNA, 21 bp, synthetic construct
  misc_feature 1..21: note = n-mer motif encoding polynucleotide
  source 1..21: mol_type = other DNA
gctgccggggggatcatgaac

SEQ ID NO: 1331 - protein, 7 aa, synthetic construct
  REGION 1..7: note = n-mer motif
ISDYTTL

SEQ ID NO: 1332 - DNA, 21 bp, synthetic construct
  misc_feature 1..21: note = n-mer motif encoding polynucleotide
  source 1..21: mol_type = other DNA
atatcagactacacaacactt

SEQ ID NO: 1333 - protein, 7 aa, synthetic construct
  REGION 1..7: note = n-mer motif
VQHDLTL

SEQ ID NO: 1334 - DNA, 21 bp, synthetic construct
  misc_feature 1..21: note = n-mer motif encoding polynucleotide
  source 1..21: mol_type = other DNA
gtccaacacgaccttaccctt

SEQ ID NO: 1335 - protein, 7 aa, synthetic construct
  REGION 1..7: note = n-mer motif
MAGSVSK

SEQ ID NO: 1336 - DNA, 21 bp, synthetic construct
  misc_feature 1..21: note = n-mer motif encoding polynucleotide
  source 1..21: mol_type = other DNA
atggctggttcggtatcaaaa

SEQ ID NO: 1337 - protein, 7 aa, synthetic construct
  REGION 1..7: note = n-mer motif
SYGSDSK

SEQ ID NO: 1338 - DNA, 21 bp, synthetic construct
  misc_feature 1..21: note = n-mer motif encoding polynucleotide
  source 1..21: mol_type = other DNA
tcttatggttctgattcgaag

SEQ ID NO: 1339 - protein, 7 aa, synthetic construct
  REGION 1..7: note = n-mer motif
VLSSPGP

SEQ ID NO: 1340 - DNA, 21 bp, synthetic construct
  misc_feature 1..21: note = n-mer motif encoding polynucleotide
  source 1..21: mol_type = other DNA
gttctgtcttcgcctggtcct

SEQ ID NO: 1341 - protein, 7 aa, synthetic construct
  REGION 1..7: note = n-mer motif
VNSGQQN

SEQ ID NO: 1342 - DNA, 21 bp, synthetic construct
  misc_feature 1..21: note = n-mer motif encoding polynucleotide
  source 1..21: mol_type = other DNA
gtaaacagcggccaacaaaac

SEQ ID NO: 1343 - protein, 7 aa, synthetic construct
  REGION 1..7: note = n-mer motif
TSQGAIT

SEQ ID NO: 1344 - DNA, 21 bp, synthetic construct
  misc_feature 1..21: note = n-mer motif encoding polynucleotide
  source 1..21: mol_type = other DNA
acgtcgcaaggcgcaataacc

SEQ ID NO: 1345 - protein, 7 aa, synthetic construct
  REGION 1..7: note = n-mer motif
AIGHSQV

SEQ ID NO: 1346 - DNA, 21 bp, synthetic construct
  misc_feature 1..21: note = n-mer motif encoding polynucleotide
  source 1..21: mol_type = other DNA
gcgattggtcatagtcaggtt

SEQ ID NO: 1347 - protein, 7 aa, synthetic construct
  REGION 1..7: note = n-mer motif
QADIVGL

SEQ ID NO: 1348 - DNA, 21 bp, synthetic construct
  misc_feature 1..21: note = n-mer motif encoding polynucleotide
  source 1..21: mol_type = other DNA
caggctgatattgttgggctg

SEQ ID NO: 1349 - protein, 7 aa, synthetic construct
  REGION 1..7: note = n-mer motif
SKSNDSS

SEQ ID NO: 1350 - DNA, 21 bp, synthetic construct
  misc_feature 1..21: note = n-mer motif encoding polynucleotide
  source 1..21: mol_type = other DNA
agtaagtctaatgatagttct

SEQ ID NO: 1351 - protein, 7 aa, synthetic construct
  REGION 1..7: note = n-mer motif
LLAGADR

SEQ ID NO: 1352 - DNA, 21 bp, synthetic construct
  misc_feature 1..21: note = n-mer motif encoding polynucleotide
  source 1..21: mol_type = other DNA
ttgcttgctggtgctgatcgt

SEQ ID NO: 1353 - protein, 7 aa, synthetic construct
  REGION 1..7: note = n-mer motif
VYSDRTM

SEQ ID NO: 1354 - DNA, 21 bp, synthetic construct
  misc_feature 1..21: note = n-mer motif encoding polynucleotide
  source 1..21: mol_type = other DNA
gtctacagtgaccgcaccatg

SEQ ID NO: 1355 - protein, 7 aa, synthetic construct
  REGION 1..7: note = n-mer motif
SEGGVKY

SEQ ID NO: 1356 - DNA, 21 bp, synthetic construct
  misc_feature 1..21: note = n-mer motif encoding polynucleotide
  source 1..21: mol_type = other DNA
agtgaggggggtgtgaagtat

SEQ ID NO: 1357 - protein, 7 aa, synthetic construct
  REGION 1..7: note = n-mer motif
SSDGGKG

SEQ ID NO: 1358 - DNA, 21 bp, synthetic construct
  misc_feature 1..21: note = n-mer motif encoding polynucleotide
  source 1..21: mol_type = other DNA
tcaagcgacggcggcaaagga

SEQ ID NO: 1359 - protein, 7 aa, synthetic construct
  REGION 1..7: note = n-mer motif
LTHSTAD

SEQ ID NO: 1360 - DNA, 21 bp, synthetic construct
  misc_feature 1..21: note = n-mer motif encoding polynucleotide
  source 1..21: mol_type = other DNA
ttgacccactccacagccgac

SEQ ID NO: 1361 - protein, 7 aa, synthetic construct
  REGION 1..7: note = n-mer motif
PGGESRG

SEQ ID NO: 1362 - DNA, 21 bp, synthetic construct
  misc_feature 1..21: note = n-mer motif encoding polynucleotide
  source 1..21: mol_type = other DNA
cctggtggggagtctcggggg

SEQ ID NO: 1363 - protein, 7 aa, synthetic construct
  REGION 1..7: note = n-mer motif
PMNGSTR

SEQ ID NO: 1364 - DNA, 21 bp, synthetic construct
  misc_feature 1..21: note = n-mer motif encoding polynucleotide
  source 1..21: mol_type = other DNA
ccgatgaacgggtccactagg

SEQ ID NO: 1365 - protein, 7 aa, synthetic construct
  REGION 1..7: note = n-mer motif
STDGGST

SEQ ID NO: 1366 - DNA, 21 bp, synthetic construct
  misc_feature 1..21: note = n-mer motif encoding polynucleotide
  source 1..21: mol_type = other DNA
tcgactgatggtggtagtact

SEQ ID NO: 1367 - protein, 7 aa, synthetic construct
  REGION 1..7: note = n-mer motif
EASGMNH

SEQ ID NO: 1368 - DNA, 21 bp, synthetic construct
  misc_feature 1..21: note = n-mer motif encoding polynucleotide
  source 1..21: mol_type = other DNA
gaagcaagcggtatgaaccac

SEQ ID NO: 1369 - protein, 7 aa, synthetic construct
  REGION 1..7: note = n-mer motif
SGDKAAL

SEQ ID NO: 1370 - DNA, 21 bp, synthetic construct
  misc_feature 1..21: note = n-mer motif encoding polynucleotide
  source 1..21: mol_type = other DNA
agtggtgataaggctgcgttg

SEQ ID NO: 1371 - protein, 7 aa, synthetic construct
  REGION 1..7: note = n-mer motif
MLRGYSQ

SEQ ID NO: 1372 - DNA, 21 bp, synthetic construct
  misc_feature 1..21: note = n-mer motif encoding polynucleotide
  source 1..21: mol_type = other DNA
atgttacgcgggtactcgcaa

SEQ ID NO: 1373 - protein, 7 aa, synthetic construct
  REGION 1..7: note = n-mer motif
GGGVEVH

SEQ ID NO: 1374 - DNA, 21 bp, synthetic construct
  misc_feature 1..21: note = n-mer motif encoding polynucleotide
  source 1..21: mol_type = other DNA
gggggtggtgtggaggttcat

SEQ ID NO: 1375 - protein, 7 aa, synthetic construct
  REGION 1..7: note = n-mer motif
NVIVNGV

SEQ ID NO: 1376 - DNA, 21 bp, synthetic construct
  misc_feature 1..21: note = n-mer motif encoding polynucleotide
  source 1..21: mol_type = other DNA
aatgtgattgtgaatggggtg

SEQ ID NO: 1377 - protein, 7 aa, synthetic construct
  REGION 1..7: note = n-mer motif
WNLDKTH

SEQ ID NO: 1378 - DNA, 21 bp, synthetic construct
  misc_feature 1..21: note = n-mer motif encoding polynucleotide
  source 1..21: mol_type = other DNA
tggaatcttgataagactcat

SEQ ID NO: 1379 - protein, 7 aa, synthetic construct
  REGION 1..7: note = n-mer motif
AQGGATV

SEQ ID NO: 1380 - DNA, 21 bp, synthetic construct
  misc_feature 1..21: note = n-mer motif encoding polynucleotide
  source 1..21: mol_type = other DNA
gcccaaggtggcgcgacggta

SEQ ID NO: 1381 - protein, 7 aa, synthetic construct
  REGION 1..7: note = n-mer motif
PLINGLV

SEQ ID NO: 1382 - DNA, 21 bp, synthetic construct
  misc_feature 1..21: note = n-mer motif encoding polynucleotide
  source 1..21: mol_type = other DNA
ccacttatcaacggcttagtt

SEQ ID NO: 1383 - protein, 7 aa, synthetic construct
  REGION 1..7: note = n-mer motif
RVELTGT

SEQ ID NO: 1384 - DNA, 21 bp, synthetic construct
  misc_feature 1..21: note = n-mer motif encoding polynucleotide
  source 1..21: mol_type = other DNA
cgcgtagaattgaccggcacg

SEQ ID NO: 1385 - protein, 7 aa, synthetic construct
  REGION 1..7: note = n-mer motif
GEGGTVR

SEQ ID NO: 1386 - DNA, 21 bp, synthetic construct
  misc_feature 1..21: note = n-mer motif encoding polynucleotide
  source 1..21: mol_type = other DNA
ggtgagggtggtactgtgagg

SEQ ID NO: 1387 - protein, 7 aa, synthetic construct
  REGION 1..7: note = n-mer motif
GAGELSS

SEQ ID NO: 1388 - DNA, 21 bp, synthetic construct
  misc_feature 1..21: note = n-mer motif encoding polynucleotide
  source 1..21: mol_type = other DNA
ggtgcgggggagcttagtagt

SEQ ID NO: 1389 - protein, 7 aa, synthetic construct
  REGION 1..7: note = n-mer motif
LGKAVPD

SEQ ID NO: 1390 - DNA, 21 bp, synthetic construct
  misc_feature 1..21: note = n-mer motif encoding polynucleotide
  source 1..21: mol_type = other DNA
cttggtaaggcggttccggat

SEQ ID NO: 1391 - protein, 7 aa, synthetic construct
  REGION 1..7: note = n-mer motif
WADTKDR

SEQ ID NO: 1392 - DNA, 21 bp, synthetic construct
  misc_feature 1..21: note = n-mer motif encoding polynucleotide
  source 1..21: mol_type = other DNA
tgggccgacacgaaagaccga

SEQ ID NO: 1393 - protein, 7 aa, synthetic construct
  REGION 1..7: note = n-mer motif
LAGLGGM

SEQ ID NO: 1394 - DNA, 21 bp, synthetic construct
  misc_feature 1..21: note = n-mer motif encoding polynucleotide
  source 1..21: mol_type = other DNA
ctagctggcctcggtggaatg

SEQ ID NO: 1395 - protein, 7 aa, synthetic construct
  REGION 1..7: note = n-mer motif
PVLAAGH

SEQ ID NO: 1396 - DNA, 21 bp, synthetic construct
  misc_feature 1..21: note = n-mer motif encoding polynucleotide
  source 1..21: mol_type = other DNA
ccagtactagcggctgggcac

SEQ ID NO: 1397 - protein, 7 aa, synthetic construct
  REGION 1..7: note = n-mer motif
SDTIGLR

SEQ ID NO: 1398 - DNA, 21 bp, synthetic construct
  misc_feature 1..21: note = n-mer motif encoding polynucleotide
  source 1..21: mol_type = other DNA
agtgacaccataggcctccgc

SEQ ID NO: 1399 - protein, 7 aa, synthetic construct
  REGION 1..7: note = n-mer motif
GVKETRA

SEQ ID NO: 1400 - DNA, 21 bp, synthetic construct
  misc_feature 1..21: note = n-mer motif encoding polynucleotide
  source 1..21: mol_type = other DNA
ggcgtcaaagaaacccgggcc

SEQ ID NO: 1401 - protein, 7 aa, synthetic construct
  REGION 1..7: note = n-mer motif
AETMGVA

SEQ ID NO: 1402 - DNA, 21 bp, synthetic construct
  misc_feature 1..21: note = n-mer motif encoding polynucleotide
  source 1..21: mol_type = other DNA
gcagaaaccatgggtgtcgcc

SEQ ID NO: 1403 - protein, 7 aa, synthetic construct
  REGION 1..7: note = n-mer motif
SLTDRAS

SEQ ID NO: 1404 - DNA, 21 bp, synthetic construct
  misc_feature 1..21: note = n-mer motif encoding polynucleotide
  source 1..21: mol_type = other DNA
tcgttgacggatagggcgtct

SEQ ID NO: 1405 - protein, 7 aa, synthetic construct
  REGION 1..7: note = n-mer motif
RSNGSEN

SEQ ID NO: 1406 - DNA, 21 bp, synthetic construct
  misc_feature 1..21: note = n-mer motif encoding polynucleotide
  source 1..21: mol_type = other DNA
aggtcgaatggttcggagaat

SEQ ID NO: 1407 - protein, 7 aa, synthetic construct
  REGION 1..7: note = n-mer motif
PGSDGRT

SEQ ID NO: 1408 - DNA, 21 bp, synthetic construct
  misc_feature 1..21: note = n-mer motif encoding polynucleotide
  source 1..21: mol_type = other DNA
ccgggttctgatggtcgtact

SEQ ID NO: 1409 - protein, 7 aa, synthetic construct
  REGION 1..7: note = n-mer motif
TRTEDYT

SEQ ID NO: 1410 - DNA, 21 bp, synthetic construct
  misc_feature 1..21: note = n-mer motif encoding polynucleotide
  source 1..21: mol_type = other DNA
actcgcactgaagactacacc

SEQ ID NO: 1411 - protein, 7 aa, synthetic construct
  REGION 1..7: note = n-mer motif
PSVSVTL

SEQ ID NO: 1412 - DNA, 21 bp, synthetic construct
  misc_feature 1..21: note = n-mer motif encoding polynucleotide
  source 1..21: mol_type = other DNA
ccttctgtttctgtgactttg

SEQ ID NO: 1413 - protein, 7 aa, synthetic construct
  REGION 1..7: note = n-mer motif
LSTGAEK

SEQ ID NO: 1414 - DNA, 21 bp, synthetic construct
  misc_feature 1..21: note = n-mer motif encoding polynucleotide
  source 1..21: mol_type = other DNA
ctctctaccggcgcagaaaaa

SEQ ID NO: 1415 - protein, 7 aa, synthetic construct
  REGION 1..7: note = n-mer motif
SETNGVR

SEQ ID NO: 1416 - DNA, 21 bp, synthetic construct
  misc_feature 1..21: note = n-mer motif encoding polynucleotide
  source 1..21: mol_type = other DNA
agcgaaacgaacggcgtccgg

SEQ ID NO: 1417 - protein, 7 aa, synthetic construct
  REGION 1..7: note = n-mer motif
SPQVYDD

SEQ ID NO: 1418 - DNA, 21 bp, synthetic construct
  misc_feature 1..21: note = n-mer motif encoding polynucleotide
  source 1..21: mol_type = other DNA
agtccgcaggtttatgatgat

SEQ ID NO: 1419 - protein, 7 aa, synthetic construct
  REGION 1..7: note = n-mer motif
EGGTHVR

SEQ ID NO: 1420 - DNA, 21 bp, synthetic construct
  misc_feature 1..21: note = n-mer motif encoding polynucleotide
  source 1..21: mol_type = other DNA
gaaggtggcacccacgtacgg

SEQ ID NO: 1421 - protein, 7 aa, synthetic construct
  REGION 1..7: note = n-mer motif
STLGSTR

SEQ ID NO: 1422 - DNA, 21 bp, synthetic construct
  misc_feature 1..21: note = n-mer motif encoding polynucleotide
  source 1..21: mol_type = other DNA
tcgacgttgggtagtacgagg

SEQ ID NO: 1423 - protein, 7 aa, synthetic construct
  REGION 1..7: note = n-mer motif
SEGKVGP

SEQ ID NO: 1424 - DNA, 21 bp, synthetic construct
  misc_feature 1..21: note = n-mer motif encoding polynucleotide
  source 1..21: mol_type = other DNA
tctgagggtaaggttgggcct

SEQ ID NO: 1425 - protein, 7 aa, synthetic construct
  REGION 1..7: note = n-mer motif
AVKDELV

SEQ ID NO: 1426 - DNA, 21 bp, synthetic construct
  misc_feature 1..21: note = n-mer motif encoding polynucleotide
  source 1..21: mol_type = other DNA
gctgttaaggatgagctggtg

SEQ ID NO: 1427 - protein, 7 aa, synthetic construct
  REGION 1..7: note = n-mer motif
TPSGNLM

SEQ ID NO: 1428 - DNA, 21 bp, synthetic construct
  misc_feature 1..21: note = n-mer motif encoding polynucleotide
  source 1..21: mol_type = other DNA
acgccgtcggggaatcttatg

SEQ ID NO: 1429 - protein, 7 aa, synthetic construct
  REGION 1..7: note = n-mer motif
VMTGTLT

SEQ ID NO: 1430 - DNA, 21 bp, synthetic construct
  misc_feature 1..21: note = n-mer motif encoding polynucleotide
  source 1..21: mol_type = other DNA
gtgatgacggggactttgact

SEQ ID NO: 1431 - protein, 7 aa, synthetic construct
  REGION 1..7: note = n-mer motif
QIASADI

SEQ ID NO: 1432 - DNA, 21 bp, synthetic construct
  misc_feature 1..21: note = n-mer motif encoding polynucleotide
  source 1..21: mol_type = other DNA
cagattgcgagtgcggatatt

SEQ ID NO: 1433 - protein, 7 aa, synthetic construct
  REGION 1..7: note = n-mer motif
LYGDGSV

SEQ ID NO: 1434 - DNA, 21 bp, synthetic construct
  misc_feature 1..21: note = n-mer motif encoding polynucleotide
  source 1..21: mol_type = other DNA
ctttatggtgatggtagtgtt

SEQ ID NO: 1435 - protein, 7 aa, synthetic construct
  REGION 1..7: note = n-mer motif
PTQLQRV

SEQ ID NO: 1436 - DNA, 21 bp, synthetic construct
  misc_feature 1..21: note = n-mer motif encoding polynucleotide
  source 1..21: mol_type = other DNA
ccgactcagctgcagcgtgtg

SEQ ID NO: 1437 - protein, 7 aa, synthetic construct
  REGION 1..7: note = n-mer motif
SNVQDGL

SEQ ID NO: 1438 - DNA, 21 bp, synthetic construct
  misc_feature 1..21: note = n-mer motif encoding polynucleotide
  source 1..21: mol_type = other DNA
agcaacgtccaagacggacta

SEQ ID NO: 1439 - protein, 7 aa, synthetic construct
  REGION 1..7: note = n-mer motif
YDAKVGH

SEQ ID NO: 1440 - DNA, 21 bp, synthetic construct
  misc_feature 1..21: note = n-mer motif encoding polynucleotide
  source 1..21: mol_type = other DNA
tacgacgcaaaagtggggcac

SEQ ID NO: 1441 - protein, 7 aa, synthetic construct
  REGION 1..7: note = n-mer motif
AVGLDNR

SEQ ID NO: 1442 - DNA, 21 bp, synthetic construct
  misc_feature 1..21: note = n-mer motif encoding polynucleotide
  source 1..21: mol_type = other DNA
gctgtgggtctggataatcgt

SEQ ID NO: 1443 - protein, 7 aa, synthetic construct
  REGION 1..7: note = n-mer motif
NSNDVHM

SEQ ID NO: 1444 - DNA, 21 bp, synthetic construct
  misc_feature 1..21: note = n-mer motif encoding polynucleotide
  source 1..21: mol_type = other DNA
aactctaacgacgtccacatg

SEQ ID NO: 1445 - protein, 7 aa, synthetic construct
  REGION 1..7: note = n-mer motif
PSGALMT

SEQ ID NO: 1446 - DNA, 21 bp, synthetic construct
  misc_feature 1..21: note = n-mer motif encoding polynucleotide
  source 1..21: mol_type = other DNA
ccgagtggtgcgctgatgact

SEQ ID NO: 1447 - protein, 7 aa, synthetic construct
  REGION 1..7: note = n-mer motif
SQEQVSA

SEQ ID NO: 1448 - DNA, 21 bp, synthetic construct
  misc_feature 1..21: note = n-mer motif encoding polynucleotide
  source 1..21: mol_type = other DNA
agtcaggagcaggtgagtgct

SEQ ID NO: 1449 - protein, 7 aa, synthetic construct
  REGION 1..7: note = n-mer motif
GSGSDGV

SEQ ID NO: 1450 - DNA, 21 bp, synthetic construct
  misc_feature 1..21: note = n-mer motif encoding polynucleotide
  source 1..21: mol_type = other DNA
gggagtggtagtgatggggtt

SEQ ID NO: 1451 - protein, 7 aa, synthetic construct
  REGION 1..7: note = n-mer motif
VDTSDRV

SEQ ID NO: 1452 - DNA, 21 bp, synthetic construct
  misc_feature 1..21: note = n-mer motif encoding polynucleotide
  source 1..21: mol_type = other DNA
gttgatactagtgatcgtgtt

SEQ ID NO: 1453 - protein, 7 aa, synthetic construct
  REGION 1..7: note = n-mer motif
ATMSPTT

SEQ ID NO: 1454 - DNA, 21 bp, synthetic construct
  misc_feature 1..21: note = n-mer motif encoding polynucleotide
  source 1..21: mol_type = other DNA
gccacaatgtcccctacaacg

SEQ ID NO: 1455 - protein, 7 aa, synthetic construct
  REGION 1..7: note = n-mer motif
TPTLPFI

SEQ ID NO: 1456 - DNA, 21 bp, synthetic construct
  misc_feature 1..21: note = n-mer motif encoding polynucleotide
  source 1..21: mol_type = other DNA
acacccaccctgccattcata

SEQ ID NO: 1457 - protein, 7 aa, synthetic construct
  REGION 1..7: note = n-mer motif
AVKEYDS

SEQ ID NO: 1458 - DNA, 21 bp, synthetic construct
  misc_feature 1..21: note = n-mer motif encoding polynucleotide
  source 1..21: mol_type = other DNA
gcggtgaaggagtatgattcg

SEQ ID NO: 1459 - protein, 7 aa, synthetic construct
  REGION 1..7: note = n-mer motif
LSLPDGD

SEQ ID NO: 1460 - DNA, 21 bp, synthetic construct
  misc_feature 1..21: note = n-mer motif encoding polynucleotide
  source 1..21: mol_type = other DNA
ctctccttaccagacggagac

SEQ ID NO: 1461 - protein, 7 aa, synthetic construct
  REGION 1..7: note = n-mer motif
AEKSGMV

SEQ ID NO: 1462 - DNA, 21 bp, synthetic construct
  misc_feature 1..21: note = n-mer motif encoding polynucleotide
  source 1..21: mol_type = other DNA
gccgaaaaatctggtatggtc

SEQ ID NO: 1463 - protein, 7 aa, synthetic construct
  REGION 1..7: note = n-mer motif
LNVDTGS

SEQ ID NO: 1464 - DNA, 21 bp, synthetic construct
  misc_feature 1..21: note = n-mer motif encoding polynucleotide
  source 1..21: mol_type = other DNA
ctcaacgtggacactggttca

SEQ ID NO: 1465 - protein, 7 aa, synthetic construct
  REGION 1..7: note = n-mer motif
PTQGTPR

SEQ ID NO: 1466 - DNA, 21 bp, synthetic construct
  misc_feature 1..21: note = n-mer motif encoding polynucleotide
  source 1..21: mol_type = other DNA
ccaacgcaaggaacaccgcga

SEQ ID NO: 1467 - protein, 7 aa, synthetic construct
  REGION 1..7: note = n-mer motif
PVGTNAR

SEQ ID NO: 1468 - DNA, 21 bp, synthetic construct
  misc_feature 1..21: note = n-mer motif encoding polynucleotide
  source 1..21: mol_type = other DNA
cctgtcggcacaaacgcaaga

SEQ ID NO: 1469 - protein, 7 aa, synthetic construct
  REGION 1..7: note = n-mer motif
NGGIITR

SEQ ID NO: 1470 - DNA, 21 bp, synthetic construct
  misc_feature 1..21: note = n-mer motif encoding polynucleotide
  source 1..21: mol_type = other DNA
aacggaggtatcatcacccgc

SEQ ID NO: 1471 - protein, 7 aa, synthetic construct
  REGION 1..7: note = n-mer motif
VVGTQDR

SEQ ID NO: 1472 - DNA, 21 bp, synthetic construct
  misc_feature 1..21: note = n-mer motif encoding polynucleotide
  source 1..21: mol_type = other DNA
gttgtggggactcaggatagg

SEQ ID NO: 1473 - protein, 7 aa, synthetic construct
  REGION 1..7: note = n-mer motif
NTLHTST

SEQ ID NO: 1474 - DNA, 21 bp, synthetic construct
  misc_feature 1..21: note = n-mer motif encoding polynucleotide
  source 1..21: mol_type = other DNA
aatactcttcatacttcgact

SEQ ID NO: 1475 - protein, 7 aa, synthetic construct
  REGION 1..7: note = n-mer motif
VGSLGTD

SEQ ID NO: 1476 - DNA, 21 bp, synthetic construct
  misc_feature 1..21: note = n-mer motif encoding polynucleotide
  source 1..21: mol_type = other DNA
gtaggctcgctgggtactgac

SEQ ID NO: 1477 - protein, 7 aa, synthetic construct
  REGION 1..7: note = n-mer motif
LSTVTGQ

SEQ ID NO: 1478 - DNA, 21 bp, synthetic construct
  misc_feature 1..21: note = n-mer motif encoding polynucleotide
  source 1..21: mol_type = other DNA
ctttcgacggtgactgggcag

SEQ ID NO: 1479 - protein, 7 aa, synthetic construct
  REGION 1..7: note = n-mer motif
VLTNTTT

SEQ ID NO: 1480 - DNA, 21 bp, synthetic construct
  misc_feature 1..21: note = n-mer motif encoding polynucleotide
  source 1..21: mol_type = other DNA
gtgcttacgaatactactact

SEQ ID NO: 1481 - protein, 7 aa, synthetic construct
  REGION 1..7: note = n-mer motif
SGDKAAL

SEQ ID NO: 1482 - DNA, 21 bp, synthetic construct
  misc_feature 1..21: note = n-mer motif encoding polynucleotide
  source 1..21: mol_type = other DNA
tccggcgacaaagccgcactt

SEQ ID NO: 1483 - protein, 7 aa, synthetic construct
  REGION 1..7: note = n-mer motif
YQTETNN

SEQ ID NO: 1484 - DNA, 21 bp, synthetic construct
  misc_feature 1..21: note = n-mer motif encoding polynucleotide
  source 1..21: mol_type = other DNA
tatcagactgagacgaataat

SEQ ID NO: 1485 - protein, 7 aa, synthetic construct
  REGION 1..7: note = n-mer motif
SVGLVAG

SEQ ID NO: 1486 - DNA, 21 bp, synthetic construct
  misc_feature 1..21: note = n-mer motif encoding polynucleotide
  source 1..21: mol_type = other DNA
agtgtgggtttggtggctggt

SEQ ID NO: 1487 - protein, 7 aa, synthetic construct
  REGION 1..7: note = n-mer motif
RMTGDLT

SEQ ID NO: 1488 - DNA, 21 bp, synthetic construct
  misc_feature 1..21: note = n-mer motif encoding polynucleotide
  source 1..21: mol_type = other DNA
cgtatgactggagacctaacc

SEQ ID NO: 1489 - protein, 7 aa, synthetic construct
  REGION 1..7: note = n-mer motif
TSGNLTW

SEQ ID NO: 1490 - DNA, 21 bp, synthetic construct
  misc_feature 1..21: note = n-mer motif encoding polynucleotide
  source 1..21: mol_type = other DNA
acttctggtaatttgacgtgg

SEQ ID NO: 1491 - protein, 7 aa, synthetic construct
  REGION 1..7: note = n-mer motif
ANVNVKV

SEQ ID NO: 1492 - DNA, 21 bp, synthetic construct
  misc_feature 1..21: note = n-mer motif encoding polynucleotide
  source 1..21: mol_type = other DNA
gcgaatgttaatgtgaaggtg

SEQ ID NO: 1493 - protein, 7 aa, synthetic construct
  REGION 1..7: note = n-mer motif
VNVTMTT

SEQ ID NO: 1494 - DNA, 21 bp, synthetic construct
  misc_feature 1..21: note = n-mer motif encoding polynucleotide
  source 1..21: mol_type = other DNA
gttaatgtgacgatgactacg

SEQ ID NO: 1495 - protein, 7 aa, synthetic construct
  REGION 1..7: note = n-mer motif
PGVSVTS

SEQ ID NO: 1496 - DNA, 21 bp, synthetic construct
  misc_feature 1..21: note = n-mer motif encoding polynucleotide
  source 1..21: mol_type = other DNA
cctggtgtgagtgtgacttct

SEQ ID NO: 1497 - protein, 7 aa, synthetic construct
  REGION 1..7: note = n-mer motif
TGDRDQF

SEQ ID NO: 1498 - DNA, 21 bp, synthetic construct
  misc_feature 1..21: note = n-mer motif encoding polynucleotide
  source 1..21: mol_type = other DNA
accggcgacagagaccaattc

SEQ ID NO: 1499 - protein, 7 aa, synthetic construct
  REGION 1..7: note = n-mer motif
SKAEGPV

SEQ ID NO: 1500 - DNA, 21 bp, synthetic construct
  misc_feature 1..21: note = n-mer motif encoding polynucleotide
  source 1..21: mol_type = other DNA
agtaaagccgaaggacctgtc

SEQ ID NO: 1501 - protein, 7 aa, synthetic construct
  REGION 1..7: note = n-mer motif
DSAPAAR

SEQ ID NO: 1502 - DNA, 21 bp, synthetic construct
  misc_feature 1..21: note = n-mer motif encoding polynucleotide
  source 1..21: mol_type = other DNA
gattcggctccggcggctcgg

SEQ ID NO: 1503 - protein, 7 aa, synthetic construct
  REGION 1..7: note = n-mer motif
SRDDGRM

SEQ ID NO: 1504 - DNA, 21 bp, synthetic construct
  misc_feature 1..21: note = n-mer motif encoding polynucleotide
  source 1..21: mol_type = other DNA
tcgcgtgatgatgggaggatg

SEQ ID NO: 1505 - protein, 7 aa, synthetic construct
  REGION 1..7: note = n-mer motif
IPEGSVR

SEQ ID NO: 1506 - DNA, 21 bp, synthetic construct
  misc_feature 1..21: note = n-mer motif encoding polynucleotide
  source 1..21: mol_type = other DNA
atccctgaaggatcagtacga

SEQ ID NO: 1507 - protein, 7 aa, synthetic construct
  REGION 1..7: note = n-mer motif
VTTVSLV

SEQ ID NO: 1508 - DNA, 21 bp, synthetic construct
  misc_feature 1..21: note = n-mer motif encoding polynucleotide
  source 1..21: mol_type = other DNA
gtaacgactgtgtccctagtt

SEQ ID NO: 1509 - protein, 7 aa, synthetic construct
  REGION 1..7: note = n-mer motif
PIHGASS

SEQ ID NO: 1510 - DNA, 21 bp, synthetic construct
  misc_feature 1..21: note = n-mer motif encoding polynucleotide
  source 1..21: mol_type = other DNA
ccgattcatggtgctagttcg

SEQ ID NO: 1511 - protein, 7 aa, synthetic construct
  REGION 1..7: note = n-mer motif
VSASISK

SEQ ID NO: 1512 - DNA, 21 bp, synthetic construct
  misc_feature 1..21: note = n-mer motif encoding polynucleotide
  source 1..21: mol_type = other DNA
gtttcggcgagtatttctaag

SEQ ID NO: 1513 - protein, 7 aa, synthetic construct
  REGION 1..7: note = n-mer motif
TKDNGVM

SEQ ID NO: 1514 - DNA, 21 bp, synthetic construct
  misc_feature 1..21: note = n-mer motif encoding polynucleotide
  source 1..21: mol_type = other DNA
actaaggataatggtgtgatg

SEQ ID NO: 1515 - protein, 7 aa, synthetic construct
  REGION 1..7: note = n-mer motif
LGASVPK

SEQ ID NO: 1516 - DNA, 21 bp, synthetic construct
  misc_feature 1..21: note = n-mer motif encoding polynucleotide
  source 1..21: mol_type = other DNA
ctaggcgcctccgtccccaaa

SEQ ID NO: 1517 - protein, 7 aa, synthetic construct
  REGION 1..7: note = n-mer motif
IEGLGGL

SEQ ID NO: 1518 - DNA, 21 bp, synthetic construct
  misc_feature 1..21: note = n-mer motif encoding polynucleotide
  source 1..21: mol_type = other DNA
atagaaggcctcggaggtttg

SEQ ID NO: 1519 - protein, 7 aa, synthetic construct
  REGION 1..7: note = n-mer motif
VSGGDYS

SEQ ID NO: 1520 - DNA, 21 bp, synthetic construct
  misc_feature 1..21: note = n-mer motif encoding polynucleotide
  source 1..21: mol_type = other DNA
gtgagtgggggtgattattcg

SEQ ID NO: 1521 - protein, 7 aa, synthetic construct
  REGION 1..7: note = n-mer motif
SEKQKVR

SEQ ID NO: 1522 - DNA, 21 bp, synthetic construct
  misc_feature 1..21: note = n-mer motif encoding polynucleotide
  source 1..21: mol_type = other DNA
agtgagaagcagaaggttagg

SEQ ID NO: 1523 - protein, 7 aa, synthetic construct
  REGION 1..7: note = n-mer motif
PGRVSSE

SEQ ID NO: 1524 - DNA, 21 bp, synthetic construct
  misc_feature 1..21: note = n-mer motif encoding polynucleotide
  source 1..21: mol_type = other DNA
cctggtcgggtcagctcagaa

SEQ ID NO: 1525 - protein, 7 aa, synthetic construct
  REGION 1..7: note = n-mer motif
DRITLGT

SEQ ID NO: 1526 - DNA, 21 bp, synthetic construct
  misc_feature 1..21: note = n-mer motif encoding polynucleotide
  source 1..21: mol_type = other DNA
gatcggattacgttggggacg

SEQ ID NO: 1527 - protein, 7 aa, synthetic construct
  REGION 1..7: note = n-mer motif
ANNGTTW

SEQ ID NO: 1528 - DNA, 21 bp, synthetic construct
  misc_feature 1..21: note = n-mer motif encoding polynucleotide
  source 1..21: mol_type = other DNA
gctaataatgggacgacttgg

SEQ ID NO: 1529 - protein, 7 aa, synthetic construct
  REGION 1..7: note = n-mer motif
TSVISQV

SEQ ID NO: 1530 - DNA, 21 bp, synthetic construct
  misc_feature 1..21: note = n-mer motif encoding polynucleotide
  source 1..21: mol_type = other DNA
acgagtgttatttcgcaggtt

SEQ ID NO: 1531 - protein, 7 aa, synthetic construct
  REGION 1..7: note = n-mer motif
LANMMSV

SEQ ID NO: 1532 - DNA, 21 bp, synthetic construct
  misc_feature 1..21: note = n-mer motif encoding polynucleotide
  source 1..21: mol_type = other DNA
ctggctaatatgatgagtgtt

SEQ ID NO: 1533 - protein, 7 aa, synthetic construct
  REGION 1..7: note = n-mer motif
EIVLTVP

SEQ ID NO: 1534 - DNA, 21 bp, synthetic construct
  misc_feature 1..21: note = n-mer motif encoding polynucleotide
  source 1..21: mol_type = other DNA
gaaatagtgctgaccgtcccc

SEQ ID NO: 1535 - protein, 7 aa, synthetic construct
  REGION 1..7: note = n-mer motif
VHKDQEI

SEQ ID NO: 1536 - DNA, 21 bp, synthetic construct
  misc_feature 1..21: note = n-mer motif encoding polynucleotide
  source 1..21: mol_type = other DNA
gtgcataaggatcaggagatt

SEQ ID NO: 1537 - protein, 7 aa, synthetic construct
  REGION 1..7: note = n-mer motif
QVGDSTL

SEQ ID NO: 1538 - DNA, 21 bp, synthetic construct
  misc_feature 1..21: note = n-mer motif encoding polynucleotide
  source 1..21: mol_type = other DNA
caagtaggagactcgacgtta

SEQ ID NO: 1539 - protein, 7 aa, synthetic construct
  REGION 1..7: note = n-mer motif
SEKSVPL

SEQ ID NO: 1540 - DNA, 21 bp, synthetic construct
  misc_feature 1..21: note = n-mer motif encoding polynucleotide
  source 1..21: mol_type = other DNA
agtgagaagagtgtgccgctt

SEQ ID NO: 1541 - protein, 7 aa, synthetic construct
  REGION 1..7: note = n-mer motif
SNHDLTH

SEQ ID NO: 1542 - DNA, 21 bp, synthetic construct
  misc_feature 1..21: note = n-mer motif encoding polynucleotide
  source 1..21: mol_type = other DNA
tccaaccacgaccttacccac

SEQ ID NO: 1543 - protein, 7 aa, synthetic construct
  REGION 1..7: note = n-mer motif
NQLAEMV

SEQ ID NO: 1544 - DNA, 21 bp, synthetic construct
  misc_feature 1..21: note = n-mer motif encoding polynucleotide
  source 1..21: mol_type = other DNA
aaccaactggctgaaatggtg

SEQ ID NO: 1545 - protein, 7 aa, synthetic construct
  REGION 1..7: note = n-mer motif
QMTHGLI

SEQ ID NO: 1546 - DNA, 21 bp, synthetic construct
  misc_feature 1..21: note = n-mer motif encoding polynucleotide
  source 1..21: mol_type = other DNA
cagatgactcatgggcttatt

SEQ ID NO: 1547 - protein, 7 aa, synthetic construct
  REGION 1..7: note = n-mer motif
QVSDNKT

SEQ ID NO: 1548 - DNA, 21 bp, synthetic construct
  misc_feature 1..21: note = n-mer motif encoding polynucleotide
  source 1..21: mol_type = other DNA
caagtatccgacaacaaaacc

SEQ ID NO: 1549 - protein, 7 aa, synthetic construct
  REGION 1..7: note = n-mer motif
GGTNSAH

SEQ ID NO: 1550 - DNA, 21 bp, synthetic construct
  misc_feature 1..21: note = n-mer motif encoding polynucleotide
  source 1..21: mol_type = other DNA
gggggtacgaatagtgctcat

SEQ ID NO: 1551 - protein, 7 aa, synthetic construct
  REGION 1..7: note = n-mer motif
GAADRMQ

SEQ ID NO: 1552 - DNA, 21 bp, synthetic construct
  misc_feature 1..21: note = n-mer motif encoding polynucleotide
  source 1..21: mol_type = other DNA
ggggcggcggatcggatgcag

SEQ ID NO: 1553 - protein, 7 aa, synthetic construct
  REGION 1..7: note = n-mer motif
ESGVHQK

SEQ ID NO: 1554 - DNA, 21 bp, synthetic construct
  misc_feature 1..21: note = n-mer motif encoding polynucleotide
  source 1..21: mol_type = other DNA
gagtctggtgttcatcagaag

SEQ ID NO: 1555 - protein, 7 aa, synthetic construct
  REGION 1..7: note = n-mer motif
GGTGALR

SEQ ID NO: 1556 - DNA, 21 bp, synthetic construct
  misc_feature 1..21: note = n-mer motif encoding polynucleotide
  source 1..21: mol_type = other DNA
ggcggcacaggggctctcaga

SEQ ID NO: 1557 - protein, 7 aa, synthetic construct
  REGION 1..7: note = n-mer motif
NTLGVAY

SEQ ID NO: 1558 - DNA, 21 bp, synthetic construct
  misc_feature 1..21: note = n-mer motif encoding polynucleotide
  source 1..21: mol_type = other DNA
aacacattaggcgtggcatac

SEQ ID NO: 1559 - protein, 7 aa, synthetic construct
  REGION 1..7: note = n-mer motif
VQHSQDN

SEQ ID NO: 1560 - DNA, 21 bp, synthetic construct
  misc_feature 1..21: note = n-mer motif encoding polynucleotide
  source 1..21: mol_type = other DNA
gtgcagcattcgcaggataat

SEQ ID NO: 1561 - protein, 7 aa, synthetic construct
  REGION 1..7: note = n-mer motif
EYNTRDK

SEQ ID NO: 1562 - DNA, 21 bp, synthetic construct
  misc_feature 1..21: note = n-mer motif encoding polynucleotide
  source 1..21: mol_type = other DNA
gagtataatactcgggataag

SEQ ID NO: 1563 - protein, 7 aa, synthetic construct
  REGION 1..7: note = n-mer motif
RSEVNGV

SEQ ID NO: 1564 - DNA, 21 bp, synthetic construct
  misc_feature 1..21: note = n-mer motif encoding polynucleotide
  source 1..21: mol_type = other DNA
cggagtgaggtgaatggggtt

SEQ ID NO: 1565 - protein, 7 aa, synthetic construct
  REGION 1..7: note = n-mer motif
GLAETRA

SEQ ID NO: 1566 - DNA, 21 bp, synthetic construct
  misc_feature 1..21: note = n-mer motif encoding polynucleotide
  source 1..21: mol_type = other DNA
gggcttgctgagactagggct

SEQ ID NO: 1567 - protein, 7 aa, synthetic construct
  REGION 1..7: note = n-mer motif
MNGGYVL

SEQ ID NO: 1568 - DNA, 21 bp, synthetic construct
  misc_feature 1..21: note = n-mer motif encoding polynucleotide
  source 1..21: mol_type = other DNA
atgaacggcggatacgtactt

SEQ ID NO: 1569 - protein, 7 aa, synthetic construct
  REGION 1..7: note = n-mer motif
TSGNAGL

SEQ ID NO: 1570 - DNA, 21 bp, synthetic construct
  misc_feature 1..21: note = n-mer motif encoding polynucleotide
  source 1..21: mol_type = other DNA
acttctggtaatgctgggctt

SEQ ID NO: 1571 - protein, 7 aa, synthetic construct
  REGION 1..7: note = n-mer motif
NTTQTSW

SEQ ID NO: 1572 - DNA, 21 bp, synthetic construct
  misc_feature 1..21: note = n-mer motif encoding polynucleotide
  source 1..21: mol_type = other DNA
aacactacacaaacgtcctgg

SEQ ID NO: 1573 - protein, 7 aa, synthetic construct
  REGION 1..7: note = n-mer motif
SLAGGTP

SEQ ID NO: 1574 - DNA, 21 bp, synthetic construct
  misc_feature 1..21: note = n-mer motif encoding polynucleotide
  source 1..21: mol_type = other DNA
tcgttggctggtggtactcct

SEQ ID NO: 1575 - protein, 7 aa, synthetic construct
  REGION 1..7: note = n-mer motif
MTGHDAV

SEQ ID NO: 1576 - DNA, 21 bp, synthetic construct
  misc_feature 1..21: note = n-mer motif encoding polynucleotide
  source 1..21: mol_type = other DNA
atgactgggcatgatgctgtg

SEQ ID NO: 1577 - protein, 7 aa, synthetic construct
  REGION 1..7: note = n-mer motif
DETRTHI

SEQ ID NO: 1578 - DNA, 21 bp, synthetic construct
  misc_feature 1..21: note = n-mer motif encoding polynucleotide
  source 1..21: mol_type = other DNA
gacgaaacccggacacacata

SEQ ID NO: 1579 - protein, 7 aa, synthetic construct
  REGION 1..7: note = n-mer motif
DMLNNTA

SEQ ID NO: 1580 - DNA, 21 bp, synthetic construct
  misc_feature 1..21: note = n-mer motif encoding polynucleotide
  source 1..21: mol_type = other DNA
gacatgttaaacaacactgct

SEQ ID NO: 1581 - protein, 7 aa, synthetic construct
  REGION 1..7: note = n-mer motif
THNENMF

SEQ ID NO: 1582 - DNA, 21 bp, synthetic construct
  misc_feature 1..21: note = n-mer motif encoding polynucleotide
  source 1..21: mol_type = other DNA
actcacaacgaaaacatgttc

SEQ ID NO: 1583 - protein, 7 aa, synthetic construct
  REGION 1..7: note = n-mer motif
RNLDLTH

SEQ ID NO: 1584 - DNA, 21 bp, synthetic construct
  misc_feature 1..21: note = n-mer motif encoding polynucleotide
  source 1..21: mol_type = other DNA
cgtaacttggacttaacgcac

SEQ ID NO: 1585 - protein, 7 aa, synthetic construct
  REGION 1..7: note = n-mer motif
RDNVEST

SEQ ID NO: 1586 - DNA, 21 bp, synthetic construct
  misc_feature 1..21: note = n-mer motif encoding polynucleotide
  source 1..21: mol_type = other DNA
agggacaacgtggaatcaaca

SEQ ID NO: 1587 - protein, 7 aa, synthetic construct
  REGION 1..7: note = n-mer motif
NVVSLAT

SEQ ID NO: 1588 - DNA, 21 bp, synthetic construct
  misc_feature 1..21: note = n-mer motif encoding polynucleotide
  source 1..21: mol_type = other DNA
aatgttgtgagtctggctact

SEQ ID NO: 1589 - protein, 7 aa, synthetic construct
  REGION 1..7: note = n-mer motif
REMGQNA

SEQ ID NO: 1590 - DNA, 21 bp, synthetic construct
  misc_feature 1..21: note = n-mer motif encoding polynucleotide
  source 1..21: mol_type = other DNA
cgtgagatggggcagaatgct

SEQ ID NO: 1591 - protein, 7 aa, synthetic construct
  REGION 1..7: note = n-mer motif
AVVSAGP

SEQ ID NO: 1592 - DNA, 21 bp, synthetic construct
  misc_feature 1..21: note = n-mer motif encoding polynucleotide
  source 1..21: mol_type = other DNA
gcggtggtgtctgctgggccg

SEQ ID NO: 1593 - protein, 7 aa, synthetic construct
  REGION 1..7: note = n-mer motif
LTGISLV

SEQ ID NO: 1594 - DNA, 21 bp, synthetic construct
  misc_feature 1..21: note = n-mer motif encoding polynucleotide
  source 1..21: mol_type = other DNA
cttacaggaatatctctcgtt

SEQ ID NO: 1595 - protein, 7 aa, synthetic construct
  REGION 1..7: note = n-mer motif
VLTVGSV

SEQ ID NO: 1596 - DNA, 21 bp, synthetic construct
  misc_feature 1..21: note = n-mer motif encoding polynucleotide
  source 1..21: mol_type = other DNA
gtactcacggtcgggagcgtg

SEQ ID NO: 1597 - protein, 7 aa, synthetic construct
  REGION 1..7: note = n-mer motif
HRDSAEP

SEQ ID NO: 1598 - DNA, 21 bp, synthetic construct
  misc_feature 1..21: note = n-mer motif encoding polynucleotide
  source 1..21: mol_type = other DNA
cacagggactcggcggaaccc

SEQ ID NO: 1599 - protein, 7 aa, synthetic construct
  REGION 1..7: note = n-mer motif
VAALGMS

SEQ ID NO: 1600 - DNA, 21 bp, synthetic construct
  misc_feature 1..21: note = n-mer motif encoding polynucleotide
  source 1..21: mol_type = other DNA
gttgctgctttgggtatgtct

SEQ ID NO: 1601 - protein, 7 aa, synthetic construct
  REGION 1..7: note = n-mer motif
TTSENLM

SEQ ID NO: 1602 - DNA, 21 bp, synthetic construct
  misc_feature 1..21: note = n-mer motif encoding polynucleotide
  source 1..21: mol_type = other DNA
acgacgtcggagaatcttatg

SEQ ID NO: 1603 - protein, 7 aa, synthetic construct
  REGION 1..7: note = n-mer motif
YTAGSQA

SEQ ID NO: 1604 - DNA, 21 bp, synthetic construct
  misc_feature 1..21: note = n-mer motif encoding polynucleotide
  source 1..21: mol_type = other DNA
tacactgctggcagtcaagcc

SEQ ID NO: 1605 - protein, 7 aa, synthetic construct
  REGION 1..7: note = n-mer motif
LSTLLGA

SEQ ID NO: 1606 - DNA, 21 bp, synthetic construct
  misc_feature 1..21: note = n-mer motif encoding polynucleotide
  source 1..21: mol_type = other DNA
ttgagtacgctactcggagcc

SEQ ID NO: 1607 - protein, 7 aa, synthetic construct
  REGION 1..7: note = n-mer motif
MSISEPR

SEQ ID NO: 1608 - DNA, 21 bp, synthetic construct
  misc_feature 1..21: note = n-mer motif encoding polynucleotide
  source 1..21: mol_type = other DNA
atgagtatctctgaaccccgt

SEQ ID NO: 1609 - protein, 7 aa, synthetic construct
  REGION 1..7: note = n-mer motif
VMDHKST

SEQ ID NO: 1610 - DNA, 21 bp, synthetic construct
  misc_feature 1..21: note = n-mer motif encoding polynucleotide
  source 1..21: mol_type = other DNA
gtcatggaccacaaatctaca

SEQ ID NO: 1611 - protein, 7 aa, synthetic construct
  REGION 1..7: note = n-mer motif
IKSDERL

SEQ ID NO: 1612 - DNA, 21 bp, synthetic construct
  misc_feature 1..21: note = n-mer motif encoding polynucleotide
  source 1..21: mol_type = other DNA
ataaaaagcgacgaacgttta

SEQ ID NO: 1613 - protein, 7 aa, synthetic construct
  REGION 1..7: note = n-mer motif
TTEKHTG

SEQ ID NO: 1614 - DNA, 21 bp, synthetic construct
  misc_feature 1..21: note = n-mer motif encoding polynucleotide
  source 1..21: mol_type = other DNA
accacggaaaaacacacgggc

SEQ ID NO: 1615 - protein, 7 aa, synthetic construct
  REGION 1..7: note = n-mer motif
ASPQGVR

SEQ ID NO: 1616 - DNA, 21 bp, synthetic construct
  misc_feature 1..21: note = n-mer motif encoding polynucleotide
  source 1..21: mol_type = other DNA
gctagtccgcagggggttcgt

SEQ ID NO: 1617 - protein, 7 aa, synthetic construct
  REGION 1..7: note = n-mer motif
PGQHNQA

SEQ ID NO: 1618 - DNA, 21 bp, synthetic construct
  misc_feature 1..21: note = n-mer motif encoding polynucleotide
  source 1..21: mol_type = other DNA
ccgggtcagcataatcaggct

SEQ ID NO: 1619 - protein, 7 aa, synthetic construct
  REGION 1..7: note = n-mer motif
PNLGNPS

SEQ ID NO: 1620 - DNA, 21 bp, synthetic construct
  misc_feature 1..21: note = n-mer motif encoding polynucleotide
  source 1..21: mol_type = other DNA
ccgaatctgggtaatcctagt

SEQ ID NO: 1621 - protein, 7 aa, synthetic construct
  REGION 1..7: note = n-mer motif
RLTEADR

SEQ ID NO: 1622 - DNA, 21 bp, synthetic construct
  misc_feature 1..21: note = n-mer motif encoding polynucleotide
  source 1..21: mol_type = other DNA
cggttgactgaggcggatcgt

SEQ ID NO: 1623 - protein, 7 aa, synthetic construct
  REGION 1..7: note = n-mer motif
WNHSSTV

SEQ ID NO: 1624 - DNA, 21 bp, synthetic construct
  misc_feature 1..21: note = n-mer motif encoding polynucleotide
  source 1..21: mol_type = other DNA
tggaaccactcatcaaccgtg

SEQ ID NO: 1625 - protein, 7 aa, synthetic construct
  REGION 1..7: note = n-mer motif
IGNALLK

SEQ ID NO: 1626 - DNA, 21 bp, synthetic construct
  misc_feature 1..21: note = n-mer motif encoding polynucleotide
  source 1..21: mol_type = other DNA
attggtaatgcgttgctgaag

SEQ ID NO: 1627 - protein, 7 aa, synthetic construct
  REGION 1..7: note = n-mer motif
TAADHLR

SEQ ID NO: 1628 - DNA, 21 bp, synthetic construct
  misc_feature 1..21: note = n-mer motif encoding polynucleotide
  source 1..21: mol_type = other DNA
actgctgctgatcatttgagg

SEQ ID NO: 1629 - protein, 7 aa, synthetic construct
  REGION 1..7: note = n-mer motif
MVSNDTS

SEQ ID NO: 1630 - DNA, 21 bp, synthetic construct
  misc_feature 1..21: note = n-mer motif encoding polynucleotide
  source 1..21: mol_type = other DNA
atggttagcaacgacactagc

SEQ ID NO: 1631 - protein, 7 aa, synthetic construct
  REGION 1..7: note = n-mer motif
IQDSVQF

SEQ ID NO: 1632 - DNA, 21 bp, synthetic construct
  misc_feature 1..21: note = n-mer motif encoding polynucleotide
  source 1..21: mol_type = other DNA
attcaggattcggttcagttt

SEQ ID NO: 1633 - protein, 7 aa, synthetic construct
  REGION 1..7: note = n-mer motif
MGENLPS

SEQ ID NO: 1634 - DNA, 21 bp, synthetic construct
  misc_feature 1..21: note = n-mer motif encoding polynucleotide
  source 1..21: mol_type = other DNA
atgggggagaatcttccgagt

SEQ ID NO: 1635 - protein, 7 aa, synthetic construct
  REGION 1..7: note = n-mer motif
ADSTQGK

SEQ ID NO: 1636 - DNA, 21 bp, synthetic construct
  misc_feature 1..21: note = n-mer motif encoding polynucleotide
  source 1..21: mol_type = other DNA
gctgattcgactcagggtaag

SEQ ID NO: 1637 - protein, 7 aa, synthetic construct
  REGION 1..7: note = n-mer motif
IPVDMNR

SEQ ID NO: 1638 - DNA, 21 bp, synthetic construct
  misc_feature 1..21: note = n-mer motif encoding polynucleotide
  source 1..21: mol_type = other DNA
atccccgtcgacatgaacagg

SEQ ID NO: 1639 - protein, 7 aa, synthetic construct
  REGION 1..7: note = n-mer motif
SVDSGRL

SEQ ID NO: 1640 - DNA, 21 bp, synthetic construct
  misc_feature 1..21: note = n-mer motif encoding polynucleotide
  source 1..21: mol_type = other DNA
agtgttgatagtgggcggctt

SEQ ID NO: 1641 - protein, 7 aa, synthetic construct
  REGION 1..7: note = n-mer motif
SYGDGGV

SEQ ID NO: 1642 - DNA, 21 bp, synthetic construct
  misc_feature 1..21: note = n-mer motif encoding polynucleotide
  source 1..21: mol_type = other DNA
tcttacggggacggaggggtc

SEQ ID NO: 1643 - protein, 7 aa, synthetic construct
  REGION 1..7: note = n-mer motif
SHSLIEV

SEQ ID NO: 1644 - DNA, 21 bp, synthetic construct
  misc_feature 1..21: note = n-mer motif encoding polynucleotide
  source 1..21: mol_type = other DNA
tctcatagtctgattgaggtg

SEQ ID NO: 1645 - protein, 7 aa, synthetic construct
  REGION 1..7: note = n-mer motif
LAGLGVI

SEQ ID NO: 1646 - DNA, 21 bp, synthetic construct
  misc_feature 1..21: note = n-mer motif encoding polynucleotide
  source 1..21: mol_type = other DNA
ctggcggggctgggcgtcata

SEQ ID NO: 1647 - protein, 7 aa, synthetic construct
  REGION 1..7: note = n-mer motif
MSVGQSW

SEQ ID NO: 1648 - DNA, 21 bp, synthetic construct
  misc_feature 1..21: note = n-mer motif encoding polynucleotide
  source 1..21: mol_type = other DNA
atgtcagtgggtcaatcttgg

SEQ ID NO: 1649 - protein, 7 aa, synthetic construct
  REGION 1..7: note = n-mer motif
TRDGQLA

SEQ ID NO: 1650 - DNA, 21 bp, synthetic construct
  misc_feature 1..21: note = n-mer motif encoding polynucleotide
  source 1..21: mol_type = other DNA
accagggacggacaactcgca

SEQ ID NO: 1651 - protein, 7 aa, synthetic construct
  REGION 1..7: note = n-mer motif
AQEVARA

SEQ ID NO: 1652 - DNA, 21 bp, synthetic construct
  misc_feature 1..21: note = n-mer motif encoding polynucleotide
  source 1..21: mol_type = other DNA
gcgcaggaggtggcgcgggct

SEQ ID NO: 1653 - protein, 7 aa, synthetic construct
  REGION 1..7: note = n-mer motif
GSVGVVV

SEQ ID NO: 1654 - DNA, 21 bp, synthetic construct
  misc_feature 1..21: note = n-mer motif encoding polynucleotide
  source 1..21: mol_type = other DNA
ggttcggtgggtgtggttgtg

SEQ ID NO: 1655 - protein, 7 aa, synthetic construct
  REGION 1..7: note = n-mer motif
GGTLLTV

SEQ ID NO: 1656 - DNA, 21 bp, synthetic construct
  misc_feature 1..21: note = n-mer motif encoding polynucleotide
  source 1..21: mol_type = other DNA
ggtgggacgttgttgacggtg

SEQ ID NO: 1657 - protein, 7 aa, synthetic construct
  REGION 1..7: note = n-mer motif
ITENVSR

SEQ ID NO: 1658 - DNA, 21 bp, synthetic construct
  misc_feature 1..21: note = n-mer motif encoding polynucleotide
  source 1..21: mol_type = other DNA
atcacggaaaacgtaagccgt

SEQ ID NO: 1659 - protein, 7 aa, synthetic construct
  REGION 1..7: note = n-mer motif
SAGVIMN

SEQ ID NO: 1660 - DNA, 21 bp, synthetic construct
  misc_feature 1..21: note = n-mer motif encoding polynucleotide
  source 1..21: mol_type = other DNA
tcggcgggtgttattatgaat

SEQ ID NO: 1661 - protein, 7 aa, synthetic construct
  REGION 1..7: note = n-mer motif
AEGLRGQ

SEQ ID NO: 1662 - DNA, 21 bp, synthetic construct
  misc_feature 1..21: note = n-mer motif encoding polynucleotide
  source 1..21: mol_type = other DNA
gctgaggggcttcgggggcag

SEQ ID NO: 1663 - protein, 7 aa, synthetic construct
  REGION 1..7: note = n-mer motif
GTGEIGM

SEQ ID NO: 1664 - DNA, 21 bp, synthetic construct
  misc_feature 1..21: note = n-mer motif encoding polynucleotide
  source 1..21: mol_type = other DNA
gggactggtgagattggtatg

SEQ ID NO: 1665 - protein, 7 aa, synthetic construct
  REGION 1..7: note = n-mer motif
VLGAHET

SEQ ID NO: 1666 - DNA, 21 bp, synthetic construct
  misc_feature 1..21: note = n-mer motif encoding polynucleotide
  source 1..21: mol_type = other DNA
gtactaggagcgcacgaaaca

SEQ ID NO: 1667 - protein, 7 aa, synthetic construct
  REGION 1..7: note = n-mer motif
MALGYSS

SEQ ID NO: 1668 - DNA, 21 bp, synthetic construct
  misc_feature 1..21: note = n-mer motif encoding polynucleotide
  source 1..21: mol_type = other DNA
atggcgttggggtatagtagt

SEQ ID NO: 1669 - protein, 7 aa, synthetic construct
  REGION 1..7: note = n-mer motif
STVTGGP

SEQ ID NO: 1670 - DNA, 21 bp, synthetic construct
  misc_feature 1..21: note = n-mer motif encoding polynucleotide
  source 1..21: mol_type = other DNA
agcaccgtcacgggcggaccc

SEQ ID NO: 1671 - protein, 7 aa, synthetic construct
  REGION 1..7: note = n-mer motif
MQGENNK

SEQ ID NO: 1672 - DNA, 21 bp, synthetic construct
  misc_feature 1..21: note = n-mer motif encoding polynucleotide
  source 1..21: mol_type = other DNA
atgcagggtgagaataataag

SEQ ID NO: 1673 - protein, 7 aa, synthetic construct
  REGION 1..7: note = n-mer motif
AAAQTAT

SEQ ID NO: 1674 - DNA, 21 bp, synthetic construct
  misc_feature 1..21: note = n-mer motif encoding polynucleotide
  source 1..21: mol_type = other DNA
gcagcagcccaaaccgcaacg

SEQ ID NO: 1675 - protein, 7 aa, synthetic construct
  REGION 1..7: note = n-mer motif
VNSGSVL

SEQ ID NO: 1676 - DNA, 21 bp, synthetic construct
  misc_feature 1..21: note = n-mer motif encoding polynucleotide
  source 1..21: mol_type = other DNA
gtgaattcgggttctgtgctg

SEQ ID NO: 1677 - protein, 7 aa, synthetic construct
  REGION 1..7: note = n-mer motif
HAAGDRS

SEQ ID NO: 1678 - DNA, 21 bp, synthetic construct
  misc_feature 1..21: note = n-mer motif encoding polynucleotide
  source 1..21: mol_type = other DNA
catgcggcgggtgatcgtagt

SEQ ID NO: 1679 - protein, 7 aa, synthetic construct
  REGION 1..7: note = n-mer motif
PVESQTA

SEQ ID NO: 1680 - DNA, 21 bp, synthetic construct
  misc_feature 1..21: note = n-mer motif encoding polynucleotide
  source 1..21: mol_type = other DNA
cccgttgaaagccaaactgcc

SEQ ID NO: 1681 - protein, 7 aa, synthetic construct
  REGION 1..7: note = n-mer motif
STIPSLM

SEQ ID NO: 1682 - DNA, 21 bp, synthetic construct
  misc_feature 1..21: note = n-mer motif encoding polynucleotide
  source 1..21: mol_type = other DNA
agcacaataccctcattaatg

SEQ ID NO: 1683 - protein, 7 aa, synthetic construct
  REGION 1..7: note = n-mer motif
KNAGAES

SEQ ID NO: 1684 - DNA, 21 bp, synthetic construct
  misc_feature 1..21: note = n-mer motif encoding polynucleotide
  source 1..21: mol_type = other DNA
aagaatgcgggtgctgagagt

SEQ ID NO: 1685 - protein, 7 aa, synthetic construct
  REGION 1..7: note = n-mer motif
SPGSDSK

SEQ ID NO: 1686 - DNA, 21 bp, synthetic construct
  misc_feature 1..21: note = n-mer motif encoding polynucleotide
  source 1..21: mol_type = other DNA
tctcctggttctgattcgaag

SEQ ID NO: 1687 - protein, 7 aa, synthetic construct
  REGION 1..7: note = n-mer motif
KVTLEGD

SEQ ID NO: 1688 - DNA, 21 bp, synthetic construct
  misc_feature 1..21: note = n-mer motif encoding polynucleotide
  source 1..21: mol_type = other DNA
aaagtcacactagaaggtgac

SEQ ID NO: 1689 - protein, 7 aa, synthetic construct
  REGION 1..7: note = n-mer motif
PQGNSSV

SEQ ID NO: 1690 - DNA, 21 bp, synthetic construct
  misc_feature 1..21: note = n-mer motif encoding polynucleotide
  source 1..21: mol_type = other DNA
ccccaaggcaacagctcagtc

SEQ ID NO: 1691 - protein, 7 aa, synthetic construct
  REGION 1..7: note = n-mer motif
VLGTTTP

SEQ ID NO: 1692 - DNA, 21 bp, synthetic construct
  misc_feature 1..21: note = n-mer motif encoding polynucleotide
  source 1..21: mol_type = other DNA
gtgcttgggacgactacgcct

SEQ ID NO: 1693 - protein, 7 aa, synthetic construct
  REGION 1..7: note = n-mer motif
LSNHGPI

SEQ ID NO: 1694 - DNA, 21 bp, synthetic construct
  misc_feature 1..21: note = n-mer motif encoding polynucleotide
  source 1..21: mol_type = other DNA
ttgtctaaccacggccccata

SEQ ID NO: 1695 - protein, 7 aa, synthetic construct
  REGION 1..7: note = n-mer motif
KENRVSD

SEQ ID NO: 1696 - DNA, 21 bp, synthetic construct
  misc_feature 1..21: note = n-mer motif encoding polynucleotide
  source 1..21: mol_type = other DNA
aaagaaaacagggtaagtgac

SEQ ID NO: 1697 - protein, 7 aa, synthetic construct
  REGION 1..7: note = n-mer motif
IGGNSGD

SEQ ID NO: 1698 - DNA, 21 bp, synthetic construct
  misc_feature 1..21: note = n-mer motif encoding polynucleotide
  source 1..21: mol_type = other DNA
attggggggaatagtggggat

SEQ ID NO: 1699 - protein, 7 aa, synthetic construct
  REGION 1..7: note = n-mer motif
GAIGPAT

SEQ ID NO: 1700 - DNA, 21 bp, synthetic construct
  misc_feature 1..21: note = n-mer motif encoding polynucleotide
  source 1..21: mol_type = other DNA
ggggctattggtcctgctact

SEQ ID NO: 1701 - protein, 7 aa, synthetic construct
  REGION 1..7: note = n-mer motif
DTHAKSM

SEQ ID NO: 1702 - DNA, 21 bp, synthetic construct
  misc_feature 1..21: note = n-mer motif
  source 1..21: mol_type = other DNA
gatacgcatgctaagagtatg

SEQ ID NO: 1703 - protein, 7 aa, synthetic construct
  REGION 1..7: note = n-mer motif
MNGGHHL

SEQ ID NO: 1704 - DNA, 21 bp, synthetic construct
  misc_feature 1..21: note = n-mer motif encoding polynucleotide
  source 1..21: mol_type = other DNA
atgaatgggggtcatcatctg

SEQ ID NO: 1705 - protein, 7 aa, synthetic construct
  REGION 1..7: note = n-mer motif
AAGLIQN

SEQ ID NO: 1706 - DNA, 21 bp, synthetic construct
  misc_feature 1..21: note = n-mer motif encoding polynucleotide
  source 1..21: mol_type = other DNA
gctgccgggctgatacaaaac

SEQ ID NO: 1707 - protein, 7 aa, synthetic construct
  REGION 1..7: note = n-mer motif
QARDTKT

SEQ ID NO: 1708 - DNA, 21 bp, synthetic construct
  misc_feature 1..21: note = n-mer motif encoding polynucleotide
  source 1..21: mol_type = other DNA
caagctcgagacaccaaaaca

SEQ ID NO: 1709 - protein, 7 aa, synthetic construct
  REGION 1..7: note = n-mer motif
SSYANEH

SEQ ID NO: 1710 - DNA, 21 bp, synthetic construct
  misc_feature 1..21: note = n-mer motif encoding polynucleotide
  source 1..21: mol_type = other DNA
agttcgtatgctaatgagcat

SEQ ID NO: 1711 - protein, 7 aa, synthetic construct
  REGION 1..7: note = n-mer motif
VLVSDRA

SEQ ID NO: 1712 - DNA, 21 bp, synthetic construct
  misc_feature 1..21: note = n-mer motif encoding polynucleotide
  source 1..21: mol_type = other DNA
gtgttggtttcggatcgtgct

SEQ ID NO: 1713 - protein, 7 aa, synthetic construct
  REGION 1..7: note = n-mer motif
WSTDGGS

SEQ ID NO: 1714 - DNA, 21 bp, synthetic construct
  misc_feature 1..21: note = n-mer motif encoding polynucleotide
  source 1..21: mol_type = other DNA
tggtcaacggacggcgggagt

SEQ ID NO: 1715 - protein, 7 aa, synthetic construct
  REGION 1..7: note = n-mer motif
CRESTCV

SEQ ID NO: 1716 - DNA, 21 bp, synthetic construct
  misc_feature 1..21: note = n-mer motif encoding polynucleotide
  source 1..21: mol_type = other DNA
tgtcgtgagtcgacgtgtgtt

SEQ ID NO: 1717 - protein, 7 aa, synthetic construct
  REGION 1..7: note = n-mer motif
SQAEGPV

SEQ ID NO: 1718 - DNA, 21 bp, synthetic construct
  misc_feature 1..21: note = n-mer motif
  source 1..21: mol_type = other DNA
agtcaagcggaagggcccgtg

SEQ ID NO: 1719 - protein, 7 aa, synthetic construct
  REGION 1..7: note = n-mer motif
ALSNDKH

SEQ ID NO: 1720 - DNA, 21 bp, synthetic construct
  misc_feature 1..21: note = n-mer motif encoding polynucleotide
  source 1..21: mol_type = other DNA
gcgcttagtaacgacaaacac

SEQ ID NO: 1721 - protein, 7 aa, synthetic construct
  REGION 1..7: note = n-mer motif
LGASVPM

SEQ ID NO: 1722 - DNA, 21 bp, synthetic construct
  misc_feature 1..21: note = n-mer motif encoding polynucleotide
  source 1..21: mol_type = other DNA
cttggtgcttcggttccgatg

SEQ ID NO: 1723 - protein, 7 aa, synthetic construct
  REGION 1..7: note = n-mer motif
YSVGDSI

SEQ ID NO: 1724 - DNA, 21 bp, synthetic construct
  misc_feature 1..21: note = n-mer motif encoding polynucleotide
  source 1..21: mol_type = other DNA
tattctgttggggatagtatt

SEQ ID NO: 1725 - protein, 7 aa, synthetic construct
  REGION 1..7: note = n-mer motif
QNSTGLW

SEQ ID NO: 1726 - DNA, 21 bp, synthetic construct
  misc_feature 1..21: note = n-mer motif encoding polynucleotide
  source 1..21: mol_type = other DNA
caaaactccacaggcctctgg

SEQ ID NO: 1727 - protein, 7 aa, synthetic construct
  REGION 1..7: note = n-mer motif
LVAGQDL

SEQ ID NO: 1728 - DNA, 21 bp, synthetic construct
  misc_feature 1..21: note = n-mer motif encoding polynucleotide
  source 1..21: mol_type = other DNA
ctggtggcggggcaggatttg

SEQ ID NO: 1729 - protein, 7 aa, synthetic construct
  REGION 1..7: note = n-mer motif
GLSEGSV

SEQ ID NO: 1730 - DNA, 21 bp, synthetic construct
  misc_feature 1..21: note = n-mer motif encoding polynucleotide
  source 1..21: mol_type = other DNA
ggcttaagcgaaggctcagta

SEQ ID NO: 1731 - protein, 7 aa, synthetic construct
  REGION 1..7: note = n-mer motif
TLAISEM

SEQ ID NO: 1732 - DNA, 21 bp, synthetic construct
  misc_feature 1..21: note = n-mer motif encoding polynucleotide
  source 1..21: mol_type = other DNA
actttggcgatttctgagatg

SEQ ID NO: 1733 - protein, 7 aa, synthetic construct
  REGION 1..7: note = n-mer motif
LVHTTNN

SEQ ID NO: 1734 - DNA, 21 bp, synthetic construct
  misc_feature 1..21: note = n-mer motif encoding polynucleotide
  source 1..21: mol_type = other DNA
ctagtacacacaaccaacaac

SEQ ID NO: 1735 - protein, 7 aa, synthetic construct
  REGION 1..7: note = n-mer motif
TVVSSTR

SEQ ID NO: 1736 - DNA, 21 bp, synthetic construct
  misc_feature 1..21: note = n-mer motif encoding polynucleotide
  source 1..21: mol_type = other DNA
actgttgtgtcttctacgagg

SEQ ID NO: 1737 - protein, 7 aa, synthetic construct
  REGION 1..7: note = n-mer motif
GRGPDLT

SEQ ID NO: 1738 - DNA, 21 bp, synthetic construct
  misc_feature 1..21: note = n-mer motif encoding polynucleotide
  source 1..21: mol_type = other DNA
ggcaggggaccagacctcact

SEQ ID NO: 1739 - protein, 7 aa, synthetic construct
  REGION 1..7: note = n-mer motif
IQSDHGR

SEQ ID NO: 1740 - DNA, 21 bp, synthetic construct
  misc_feature 1..21: note = n-mer motif encoding polynucleotide
  source 1..21: mol_type = other DNA
atccaaagtgaccacggacgc

SEQ ID NO: 1741 - protein, 7 aa, synthetic construct
  REGION 1..7: note = n-mer motif
QSSEMRD

SEQ ID NO: 1742 - DNA, 21 bp, synthetic construct
  misc_feature 1..21: note = n-mer motif encoding polynucleotide
  source 1..21: mol_type = other DNA
caatcgtccgaaatgcgtgac

SEQ ID NO: 1743 - protein, 7 aa, synthetic construct
  REGION 1..7: note = n-mer motif
GSSENVS

SEQ ID NO: 1744 - DNA, 21 bp, synthetic construct
  misc_feature 1..21: note = n-mer motif encoding polynucleotide
  source 1..21: mol_type = other DNA
ggaagctccgaaaacgtatct

SEQ ID NO: 1745 - protein, 7 aa, synthetic construct
  REGION 1..7: note = n-mer motif
KTPGVDP

SEQ ID NO: 1746 - DNA, 21 bp, synthetic construct
  misc_feature 1..21: note = n-mer motif encoding polynucleotide
  source 1..21: mol_type = other DNA
aagactccgggggtggatcct

SEQ ID NO: 1747 - protein, 7 aa, synthetic construct
  REGION 1..7: note = n-mer motif
QADDHGR

SEQ ID NO: 1748 - DNA, 21 bp, synthetic construct
  misc_feature 1..21: note = n-mer motif encoding polynucleotide
  source 1..21: mol_type = other DNA
caggcggatgatcatggtagg

SEQ ID NO: 1749 - protein, 7 aa, synthetic construct
  REGION 1..7: note = n-mer motif
AYSDGSS

SEQ ID NO: 1750 - DNA, 21 bp, synthetic construct
  misc_feature 1..21: note = n-mer motif
  source 1..21: mol_type = other DNA
gcttatagtgatgggtcgtct

SEQ ID NO: 1751 - protein, 7 aa, synthetic construct
  REGION 1..7: note = n-mer motif
MAASMTN

SEQ ID NO: 1752 - DNA, 21 bp, synthetic construct
  misc_feature 1..21: note = n-mer motif encoding polynucleotide
  source 1..21: mol_type = other DNA
atggctgcctcgatgacaaac

SEQ ID NO: 1753 - protein, 7 aa, synthetic construct
  REGION 1..7: note = n-mer motif
STIPTLT

SEQ ID NO: 1754 - DNA, 21 bp, synthetic construct
  misc_feature 1..21: note = n-mer motif encoding polynucleotide
  source 1..21: mol_type = other DNA
agtactattcctactctgacg

SEQ ID NO: 1755 - protein, 7 aa, synthetic construct
  REGION 1..7: note = n-mer motif
AEVLNAL

SEQ ID NO: 1756 - DNA, 21 bp, synthetic construct
  misc_feature 1..21: note = n-mer motif encoding polynucleotide
  source 1..21: mol_type = other DNA
gcggaggtgctgaatgctttg

SEQ ID NO: 1757 - protein, 7 aa, synthetic construct
  REGION 1..7: note = n-mer motif
AESLSGL

SEQ ID NO: 1758 - DNA, 21 bp, synthetic construct
  misc_feature 1..21: note = n-mer motif encoding polynucleotide
  source 1..21: mol_type = other DNA
gctgagagtttgagtgggttg

SEQ ID NO: 1759 - protein, 7 aa, synthetic construct
  REGION 1..7: note = n-mer motif
NQGGGLT

SEQ ID NO: 1760 - DNA, 21 bp, synthetic construct
  misc_feature 1..21: note = n-mer motif encoding polynucleotide
  source 1..21: mol_type = other DNA
aaccaaggtggcggcttaaca

SEQ ID NO: 1761 - protein, 7 aa, synthetic construct
  REGION 1..7: note = n-mer motif
AHNGGVQ

SEQ ID NO: 1762 - DNA, 21 bp, synthetic construct
  misc_feature 1..21: note = n-mer motif encoding polynucleotide
  source 1..21: mol_type = other DNA
gctcataatggtggtgttcag

SEQ ID NO: 1763 - protein, 7 aa, synthetic construct
  REGION 1..7: note = n-mer motif
MGGSVTI

SEQ ID NO: 1764 - DNA, 21 bp, synthetic construct
  misc_feature 1..21: note = n-mer motif encoding polynucleotide
  source 1..21: mol_type = other DNA
atggggggtagtgttacgatt

SEQ ID NO: 1765 - protein, 7 aa, synthetic construct
  REGION 1..7: note = n-mer motif
VSVSMGI

SEQ ID NO: 1766 - DNA, 21 bp, synthetic construct
  misc_feature 1..21: note = n-mer motif encoding polynucleotide
  source 1..21: mol_type = other DNA
gttagtgtgagtatgggcatc

SEQ ID NO: 1767 - protein, 7 aa, synthetic construct
  REGION 1..7: note = n-mer motif
SGVAYER

SEQ ID NO: 1768 - DNA, 21 bp, synthetic construct
  misc_feature 1..21: note = n-mer motif encoding polynucleotide
  source 1..21: mol_type = other DNA
agtggggtggcttatgagagg

SEQ ID NO: 1769 - protein, 7 aa, synthetic construct
  REGION 1..7: note = n-mer motif
PSATQSL

SEQ ID NO: 1770 - DNA, 21 bp, synthetic construct
  misc_feature 1..21: note = n-mer motif encoding polynucleotide
  source 1..21: mol_type = other DNA
ccgtctgcgactcagtcgttg

SEQ ID NO: 1771 - protein, 7 aa, synthetic construct
  REGION 1..7: note = n-mer motif
STGENKD

SEQ ID NO: 1772 - DNA, 21 bp, synthetic construct
  misc_feature 1..21: note = n-mer motif encoding polynucleotide
  source 1..21: mol_type = other DNA
tccacgggcgaaaacaaagac

SEQ ID NO: 1773 - protein, 7 aa, synthetic construct
  REGION 1..7: note = n-mer motif
PTQGTLG

SEQ ID NO: 1774 - DNA, 21 bp, synthetic construct
  misc_feature 1..21: note = n-mer motif encoding polynucleotide
  source 1..21: mol_type = other DNA
cctactcaggggacgcttggg

SEQ ID NO: 1775 - protein, 7 aa, synthetic construct
  REGION 1..7: note = n-mer motif
VLSADSV

SEQ ID NO: 1776 - DNA, 21 bp, synthetic construct
  misc_feature 1..21: note = n-mer motif encoding polynucleotide
  source 1..21: mol_type = other DNA
gtgctttcggctgattctgtg

SEQ ID NO: 1777 - protein, 7 aa, synthetic construct
  REGION 1..7: note = n-mer motif
LGETLIR

SEQ ID NO: 1778 - DNA, 21 bp, synthetic construct
  misc_feature 1..21: note = n-mer motif encoding polynucleotide
  source 1..21: mol_type = other DNA
ttgggggagactctgattcgg

SEQ ID NO: 1779 - protein, 7 aa, synthetic construct
  REGION 1..7: note = n-mer motif
EHLAGVV

SEQ ID NO: 1780 - DNA, 21 bp, synthetic construct
  misc_feature 1..21: note = n-mer motif encoding polynucleotide
  source 1..21: mol_type = other DNA
gagcatttggctggtgttgtt

SEQ ID NO: 1781 - protein, 7 aa, synthetic construct
  REGION 1..7: note = n-mer motif
QSDNHGR

SEQ ID NO: 1782 - DNA, 21 bp, synthetic construct
  misc_feature 1..21: note = n-mer motif encoding polynucleotide
  source 1..21: mol_type = other DNA
caaagcgacaaccacgggcgg

SEQ ID NO: 1783 - protein, 7 aa, synthetic construct
  REGION 1..7: note = n-mer motif
LSVSQSA

SEQ ID NO: 1784 - DNA, 21 bp, synthetic construct
  misc_feature 1..21: note = n-mer motif encoding polynucleotide
  source 1..21: mol_type = other DNA
ctgagtgtttctcagtcggcg

SEQ ID NO: 1785 - protein, 7 aa, synthetic construct
  REGION 1..7: note = n-mer motif
SELSLGY

SEQ ID NO: 1786 - DNA, 21 bp, synthetic construct
  misc_feature 1..21: note = n-mer motif encoding polynucleotide
  source 1..21: mol_type = other DNA
agcgaattgagtctcggctac

SEQ ID NO: 1787 - protein, 7 aa, synthetic construct
  REGION 1..7: note = n-mer motif
AEDKANS

SEQ ID NO: 1788 - DNA, 21 bp, synthetic construct
  misc_feature 1..21: note = n-mer motif encoding polynucleotide
  source 1..21: mol_type = other DNA
gctgaggataaggcgaatagt

SEQ ID NO: 1789 - protein, 7 aa, synthetic construct
  REGION 1..7: note = n-mer motif
STINTLM

SEQ ID NO: 1790 - DNA, 21 bp, synthetic construct
  misc_feature 1..21: note = n-mer motif encoding polynucleotide
  source 1..21: mol_type = other DNA
tcgacaataaacaccctaatg

SEQ ID NO: 1791 - protein, 7 aa, synthetic construct
  REGION 1..7: note = n-mer motif
TGMTLGT

SEQ ID NO: 1792 - DNA, 21 bp, synthetic construct
  misc_feature 1..21: note = n-mer motif encoding polynucleotide
  source 1..21: mol_type = other DNA
acggggatgacgctgggtacg

SEQ ID NO: 1793 - protein, 7 aa, synthetic construct
  REGION 1..7: note = n-mer motif
LNGGHVL

SEQ ID NO: 1794 - DNA, 21 bp, synthetic construct
  misc_feature 1..21: note = n-mer motif encoding polynucleotide
  source 1..21: mol_type = other DNA
ttgaatgggggtcatgttctg

SEQ ID NO: 1795 - protein, 7 aa, synthetic construct
  REGION 1..7: note = n-mer motif
VVSDAGK

SEQ ID NO: 1796 - DNA, 21 bp, synthetic construct
  misc_feature 1..21: note = n-mer motif encoding polynucleotide
  source 1..21: mol_type = other DNA
gtggtgagtgatgctgggaag

SEQ ID NO: 1797 - protein, 7 aa, synthetic construct
  REGION 1..7: note = n-mer motif
MNPSNSM

SEQ ID NO: 1798 - DNA, 21 bp, synthetic construct
  misc_feature 1..21: note = n-mer motif encoding polynucleotide
  source 1..21: mol_type = other DNA
atgaatcctagtaattcgatg

SEQ ID NO: 1799 - protein, 7 aa, synthetic construct
  REGION 1..7: note = n-mer motif
TAASIQS

SEQ ID NO: 1800 - DNA, 21 bp, synthetic construct
  misc_feature 1..21: note = n-mer motif encoding polynucleotide
  source 1..21: mol_type = other DNA
acggccgcaagcatacaatcc

SEQ ID NO: 1801 - protein, 7 aa, synthetic construct
  REGION 1..7: note = n-mer motif
RGTEHLM

SEQ ID NO: 1802 - DNA, 21 bp, synthetic construct
  misc_feature 1..21: note = n-mer motif encoding polynucleotide
  source 1..21: mol_type = other DNA
cgtggtactgagcatttgatg

SEQ ID NO: 1803 - protein, 7 aa, synthetic construct
  REGION 1..7: note = n-mer motif
LLADKSV

SEQ ID NO: 1804 - DNA, 21 bp, synthetic construct
  misc_feature 1..21: note = n-mer motif encoding polynucleotide
  source 1..21: mol_type = other DNA
cttcttgctgataagagtgtg

SEQ ID NO: 1805 - protein, 7 aa, synthetic construct
  REGION 1..7: note = n-mer motif
PGEHNHA

SEQ ID NO: 1806 - DNA, 21 bp, synthetic construct
  misc_feature 1..21: note = n-mer motif encoding polynucleotide
  source 1..21: mol_type = other DNA
ccgggtgagcataatcatgct

SEQ ID NO: 1807 - protein, 7 aa, synthetic construct
  REGION 1..7: note = n-mer motif
GTTSDTY

SEQ ID NO: 1808 - DNA, 21 bp, synthetic construct
  misc_feature 1..21: note = n-mer motif encoding polynucleotide
  source 1..21: mol_type = other DNA
ggtactacgtcggatacttat

SEQ ID NO: 1809 - protein, 7 aa, synthetic construct
  REGION 1..7: note = n-mer motif
GDISARY

SEQ ID NO: 1810 - DNA, 21 bp, synthetic construct
  misc_feature 1..21: note = n-mer motif encoding polynucleotide
  source 1..21: mol_type = other DNA
ggtgatatttctgcgaggtat

SEQ ID NO: 1811 - protein, 7 aa, synthetic construct
  REGION 1..7: note = n-mer motif
FSVSSLS

SEQ ID NO: 1812 - DNA, 21 bp, synthetic construct
  misc_feature 1..21: note = n-mer motif encoding polynucleotide
  source 1..21: mol_type = other DNA
ttctccgtctcaagtttatcc

SEQ ID NO: 1813 - protein, 7 aa, synthetic construct
  REGION 1..7: note = n-mer motif
TSDRDQY

SEQ ID NO: 1814 - DNA, 21 bp, synthetic construct
  misc_feature 1..21: note = n-mer motif encoding polynucleotide
  source 1..21: mol_type = other DNA
actagtgatcgggatcagtat

SEQ ID NO: 1815 - protein, 7 aa, synthetic construct
  REGION 1..7: note = n-mer motif
AHVHVKE

SEQ ID NO: 1816 - DNA, 21 bp, synthetic construct
  misc_feature 1..21: note = n-mer motif encoding polynucleotide
  source 1..21: mol_type = other DNA
gcgcatgttcatgtgaaggag

SEQ ID NO: 1817 - protein, 7 aa, synthetic construct
  REGION 1..7: note = n-mer motif
GRDLSTA

SEQ ID NO: 1818 - DNA, 21 bp, synthetic construct
  misc_feature 1..21: note = n-mer motif encoding polynucleotide
  source 1..21: mol_type = other DNA
ggtcgggatctttcgactgct

SEQ ID NO: 1819 - protein, 7 aa, synthetic construct
  REGION 1..7: note = n-mer motif
GGGTEFY

SEQ ID NO: 1820 - DNA, 21 bp, synthetic construct
  misc_feature 1..21: note = n-mer motif encoding polynucleotide
  source 1..21: mol_type = other DNA
ggaggaggcactgaattctac

SEQ ID NO: 1821 - protein, 7 aa, synthetic construct
  REGION 1..7: note = n-mer motif
PYPSNSH

SEQ ID NO: 1822 - DNA, 21 bp, synthetic construct
  misc_feature 1..21: note = n-mer motif encoding polynucleotide
  source 1..21: mol_type = other DNA
ccgtatccgagtaattcgcat

SEQ ID NO: 1823 - protein, 7 aa, synthetic construct
  REGION 1..7: note = n-mer motif
NLGVGQM

SEQ ID NO: 1824 - DNA, 21 bp, synthetic construct
  misc_feature 1..21: note = n-mer motif encoding polynucleotide
  source 1..21: mol_type = other DNA
aatttgggtgtgggtcagatg

SEQ ID NO: 1825 - protein, 7 aa, synthetic construct
  REGION 1..7: note = n-mer motif
LSPGTDK

SEQ ID NO: 1826 - DNA, 21 bp, synthetic construct
  misc_feature 1..21: note = n-mer motif encoding polynucleotide
  source 1..21: mol_type = other DNA
ctgtcgccggggacggataag

SEQ ID NO: 1827 - protein, 7 aa, synthetic construct
  REGION 1..7: note = n-mer motif
GTDRVSR

SEQ ID NO: 1828 - DNA, 21 bp, synthetic construct
  misc_feature 1..21: note = n-mer motif encoding polynucleotide
  source 1..21: mol_type = other DNA
ggcacagacagagtatcccgt

SEQ ID NO: 1829 - protein, 7 aa, synthetic construct
  REGION 1..7: note = n-mer motif
MADGASM

SEQ ID NO: 1830 - DNA, 21 bp, synthetic construct
  misc_feature 1..21: note = n-mer motif encoding polynucleotide
  source 1..21: mol_type = other DNA
atggcggatggtgcgtctatg

SEQ ID NO: 1831 - protein, 7 aa, synthetic construct
  REGION 1..7: note = n-mer motif
AGISNQT

SEQ ID NO: 1832 - DNA, 21 bp, synthetic construct
  misc_feature 1..21: note = n-mer motif encoding polynucleotide
  source 1..21: mol_type = other DNA
gccggaatctctaaccaaact

SEQ ID NO: 1833 - protein, 7 aa, synthetic construct
  REGION 1..7: note = n-mer motif
ETQGRQF

SEQ ID NO: 1834 - DNA, 21 bp, synthetic construct
  misc_feature 1..21: note = n-mer motif encoding polynucleotide
  source 1..21: mol_type = other DNA
gagactcagggtcgtcagttt

SEQ ID NO: 1835 - protein, 7 aa, synthetic construct
  REGION 1..7: note = n-mer motif
YGSNDLS

SEQ ID NO: 1836 - DNA, 21 bp, synthetic construct
  misc_feature 1..21: note = n-mer motif encoding polynucleotide
  source 1..21: mol_type = other DNA
tatgggagtaatgatctgagt

SEQ ID NO: 1837 - protein, 7 aa, synthetic construct
  REGION 1..7: note = n-mer motif
AADNNRW

SEQ ID NO: 1838 - DNA, 21 bp, synthetic construct
  misc_feature 1..21: note = n-mer motif encoding polynucleotide
  source 1..21: mol_type = other DNA
gctgctgataataataggtgg

SEQ ID NO: 1839 - protein, 7 aa, synthetic construct
  REGION 1..7: note = n-mer motif
MPSNGQV

SEQ ID NO: 1840 - DNA, 21 bp, synthetic construct
  misc_feature 1..21: note = n-mer motif encoding polynucleotide
  source 1..21: mol_type = other DNA
atgccgtctaatgggcaggtt

SEQ ID NO: 1841 - protein, 7 aa, synthetic construct
  REGION 1..7: note = n-mer motif
GFGDGTR

SEQ ID NO: 1842 - DNA, 21 bp, synthetic construct
  misc_feature 1..21: note = n-mer motif encoding polynucleotide
  source 1..21: mol_type = other DNA
ggcttcggagacggtacacgc

SEQ ID NO: 1843 - protein, 7 aa, synthetic construct
  REGION 1..7: note = n-mer motif
RLNEHEA

SEQ ID NO: 1844 - DNA, 21 bp, synthetic construct
  misc_feature 1..21: note = n-mer motif encoding polynucleotide
  source 1..21: mol_type = other DNA
aggttaaacgaacacgaagcc

SEQ ID NO: 1845 - protein, 7 aa, synthetic construct
  REGION 1..7: note = n-mer motif
SVKSVTL

SEQ ID NO: 1846 - DNA, 21 bp, synthetic construct
  misc_feature 1..21: note = n-mer motif encoding polynucleotide
  source 1..21: mol_type = other DNA
agtgtgaagagtgtgacgctt

SEQ ID NO: 1847 - protein, 7 aa, synthetic construct
  REGION 1..7: note = n-mer motif
LTDGYTP

SEQ ID NO: 1848 - DNA, 21 bp, synthetic construct
  misc_feature 1..21: note = n-mer motif encoding polynucleotide
  source 1..21: mol_type = other DNA
ctgaccgacggttacacaccg

SEQ ID NO: 1849 - protein, 7 aa, synthetic construct
  REGION 1..7: note = n-mer motif
SNIGNDR

SEQ ID NO: 1850 - DNA, 21 bp, synthetic construct
  misc_feature 1..21: note = n-mer motif encoding polynucleotide
  source 1..21: mol_type = other DNA
tcgaatattgggaatgatagg

SEQ ID NO: 1851 - protein, 7 aa, synthetic construct
  REGION 1..7: note = n-mer motif
KESTLST

SEQ ID NO: 1852 - DNA, 21 bp, synthetic construct
  misc_feature 1..21: note = n-mer motif encoding polynucleotide
  source 1..21: mol_type = other DNA
aaagaaagtaccctctcaaca

SEQ ID NO: 1853 - protein, 7 aa, synthetic construct
  REGION 1..7: note = n-mer motif
RVDPAQL

SEQ ID NO: 1854 - DNA, 21 bp, synthetic construct
  misc_feature 1..21: note = n-mer motif encoding polynucleotide
  source 1..21: mol_type = other DNA
agggtggatccggcgcagctt

SEQ ID NO: 1855 - protein, 7 aa, synthetic construct
  REGION 1..7: note = n-mer motif
MYGESAK

SEQ ID NO: 1856 - DNA, 21 bp, synthetic construct
  misc_feature 1..21: note = n-mer motif encoding polynucleotide
  source 1..21: mol_type = other DNA
atgtacggggaaagcgctaaa

SEQ ID NO: 1857 - protein, 7 aa, synthetic construct
  REGION 1..7: note = n-mer motif
VAEGGQI

SEQ ID NO: 1858 - DNA, 21 bp, synthetic construct
  misc_feature 1..21: note = n-mer motif encoding polynucleotide
  source 1..21: mol_type = other DNA
gtggcggagggtgggcagatt

SEQ ID NO: 1859 - protein, 7 aa, synthetic construct
  REGION 1..7: note = n-mer motif
LTDRVSR

SEQ ID NO: 1860 - DNA, 21 bp, synthetic construct
  misc_feature 1..21: note = n-mer motif encoding polynucleotide
  source 1..21: mol_type = other DNA
ctaaccgacagagtctctcga

SEQ ID NO: 1861 - protein, 7 aa, synthetic construct
  REGION 1..7: note = n-mer motif
RLDELMI

SEQ ID NO: 1862 - DNA, 21 bp, synthetic construct
  misc_feature 1..21: note = n-mer motif encoding polynucleotide
  source 1..21: mol_type = other DNA
cgattggacgaactaatgatc

SEQ ID NO: 1863 - protein, 7 aa, synthetic construct
  REGION 1..7: note = n-mer motif
PVKEYES

SEQ ID NO: 1864 - DNA, 21 bp, synthetic construct
  misc_feature 1..21: note = n-mer motif encoding polynucleotide
  source 1..21: mol_type = other DNA
ccggtgaaggagtatgagtcg

SEQ ID NO: 1865 - protein, 7 aa, synthetic construct
  REGION 1..7: note = n-mer motif
QGGDSGG

SEQ ID NO: 1866 - DNA, 21 bp, synthetic construct
  misc_feature 1..21: note = n-mer motif encoding polynucleotide
  source 1..21: mol_type = other DNA
caagggggagactcaggtggc

SEQ ID NO: 1867 - protein, 7 aa, synthetic construct
  REGION 1..7: note = n-mer motif
VHTEAPY

SEQ ID NO: 1868 - DNA, 21 bp, synthetic construct
  misc_feature 1..21: note = n-mer motif encoding polynucleotide
  source 1..21: mol_type = other DNA
gttcatacggaggctccgtat

SEQ ID NO: 1869 - protein, 7 aa, synthetic construct
  REGION 1..7: note = n-mer motif
SQELRDR

SEQ ID NO: 1870 - DNA, 21 bp, synthetic construct
  misc_feature 1..21: note = n-mer motif encoding polynucleotide
  source 1..21: mol_type = other DNA
agtcaggagctgagggatcgt

SEQ ID NO: 1871 - protein, 7 aa, synthetic construct
  REGION 1..7: note = n-mer motif
VSRENVS

SEQ ID NO: 1872 - DNA, 21 bp, synthetic construct
  misc_feature 1..21: note = n-mer motif encoding polynucleotide
  source 1..21: mol_type = other DNA
gtctcgcgtgaaaacgtttcc

SEQ ID NO: 1873 - protein, 7 aa, synthetic construct
  REGION 1..7: note = n-mer motif
STDLSEL

SEQ ID NO: 1874 - DNA, 21 bp, synthetic construct
  misc_feature 1..21: note = n-mer motif encoding polynucleotide
  source 1..21: mol_type = other DNA
tctacggatttgtcggagttg

SEQ ID NO: 1875 - protein, 7 aa, synthetic construct
  REGION 1..7: note = n-mer motif
GTGIQTR

SEQ ID NO: 1876 - DNA, 21 bp, synthetic construct
  misc_feature 1..21: note = n-mer motif encoding polynucleotide
  source 1..21: mol_type = other DNA
ggcacaggaatccaaacacgt

SEQ ID NO: 1877 - protein, 7 aa, synthetic construct
  REGION 1..7: note = n-mer motif
ADSDYTE

SEQ ID NO: 1878 - DNA, 21 bp, synthetic construct
  misc_feature 1..21: note = n-mer motif encoding polynucleotide
  source 1..21: mol_type = other DNA
gcagactccgactacacagaa

SEQ ID NO: 1879 - protein, 7 aa, synthetic construct
  REGION 1..7: note = n-mer motif
VDTSARD

SEQ ID NO: 1880 - DNA, 21 bp, synthetic construct
  misc_feature 1..21: note = n-mer motif encoding polynucleotide
  source 1..21: mol_type = other DNA
gtcgacacgtctgcaagagac

SEQ ID NO: 1881 - protein, 7 aa, synthetic construct
  REGION 1..7: note = n-mer motif
LGNKDGV

SEQ ID NO: 1882 - DNA, 21 bp, synthetic construct
  misc_feature 1..21: note = n-mer motif encoding polynucleotide
  source 1..21: mol_type = other DNA
ttggggaataaggatggtgtt

SEQ ID NO: 1883 - protein, 7 aa, synthetic construct
  REGION 1..7: note = n-mer motif
REAGTNS

SEQ ID NO: 1884 - DNA, 21 bp, synthetic construct
  misc_feature 1..21: note = n-mer motif encoding polynucleotide
  source 1..21: mol_type = other DNA
cgggaggctgggacgaattct

SEQ ID NO: 1885 - protein, 7 aa, synthetic construct
  REGION 1..7: note = n-mer motif
PGATNNP

SEQ ID NO: 1886 - DNA, 21 bp, synthetic construct
  misc_feature 1..21: note = n-mer motif encoding polynucleotide
  source 1..21: mol_type = other DNA
ccgggtgcgacgaataatccg

SEQ ID NO: 1887 - protein, 7 aa, synthetic construct
  REGION 1..7: note = n-mer motif
NSISLIN

SEQ ID NO: 1888 - DNA, 21 bp, synthetic construct
  misc_feature 1..21: note = n-mer motif encoding polynucleotide
  source 1..21: mol_type = other DNA
aactctatcagcctcataaac

SEQ ID NO: 1889 - protein, 7 aa, synthetic construct
  REGION 1..7: note = n-mer motif
ASSEFKI

SEQ ID NO: 1890 - DNA, 21 bp, synthetic construct
  misc_feature 1..21: note = n-mer motif encoding polynucleotide
  source 1..21: mol_type = other DNA
gcctcatccgaattcaaaata

SEQ ID NO: 1891 - protein, 7 aa, synthetic construct
  REGION 1..7: note = n-mer motif
VTTGSPV

SEQ ID NO: 1892 - DNA, 21 bp, synthetic construct
  misc_feature 1..21: note = n-mer motif encoding polynucleotide
  source 1..21: mol_type = other DNA
gttacgactgggtcgccggta

SEQ ID NO: 1893 - protein, 7 aa, synthetic construct
  REGION 1..7: note = n-mer motif
GSTNVNV

SEQ ID NO: 1894 - DNA, 21 bp, synthetic construct
  misc_feature 1..21: note = n-mer motif encoding polynucleotide
  source 1..21: mol_type = other DNA
ggtagtacgaatgttaatgtg

SEQ ID NO: 1895 - protein, 7 aa, synthetic construct
  REGION 1..7: note = n-mer motif
GDMSGSL

SEQ ID NO: 1896 - DNA, 21 bp, synthetic construct
  misc_feature 1..21: note = n-mer motif encoding polynucleotide
  source 1..21: mol_type = other DNA
ggggatatgagtgggagtttg

SEQ ID NO: 1897 - protein, 7 aa, synthetic construct
  REGION 1..7: note = n-mer motif
SRTDSGP

SEQ ID NO: 1898 - DNA, 21 bp, synthetic construct
  misc_feature 1..21: note = n-mer motif encoding polynucleotide
  source 1..21: mol_type = other DNA
agtcgtacggattcggggccg

SEQ ID NO: 1899 - protein, 7 aa, synthetic construct
  REGION 1..7: note = n-mer motif
EKGSTLV

SEQ ID NO: 1900 - DNA, 21 bp, synthetic construct
  misc_feature 1..21: note = n-mer motif encoding polynucleotide
  source 1..21: mol_type = other DNA
gagaaggggtcgacgttggtg

SEQ ID NO: 1901 - protein, 7 aa, synthetic construct
  REGION 1..7: note = n-mer motif
GHATDSV

SEQ ID NO: 1902 - DNA, 21 bp, synthetic construct
  misc_feature 1..21: note = n-mer motif encoding polynucleotide
  source 1..21: mol_type = other DNA
ggtcatgctactgatagtgtg

SEQ ID NO: 1903 - protein, 7 aa, synthetic construct
  REGION 1..7: note = n-mer motif
VSNGTFV

SEQ ID NO: 1904 - DNA, 21 bp, synthetic construct
  misc_feature 1..21: note = n-mer motif encoding polynucleotide
  source 1..21: mol_type = other DNA
gtgtcgaacggaacgttcgta

SEQ ID NO: 1905 - protein, 7 aa, synthetic construct
  REGION 1..7: note = n-mer motif
SAGGSLQ

SEQ ID NO: 1906 - DNA, 21 bp, synthetic construct
  misc_feature 1..21: note = n-mer motif encoding polynucleotide
  source 1..21: mol_type = other DNA
tcggcaggaggtagcctacaa

SEQ ID NO: 1907 - protein, 7 aa, synthetic construct
  REGION 1..7: note = n-mer motif
HDTSDSV

SEQ ID NO: 1908 - DNA, 21 bp, synthetic construct
  misc_feature 1..21: note = n-mer motif encoding polynucleotide
  source 1..21: mol_type = other DNA
catgatactagtgatagtgtt

SEQ ID NO: 1909 - protein, 7 aa, synthetic construct
  REGION 1..7: note = n-mer motif
AAGVSLN

SEQ ID NO: 1910 - DNA, 21 bp, synthetic construct
  misc_feature 1..21: note = n-mer motif encoding polynucleotide
  source 1..21: mol_type = other DNA
gcggcgggtgttagtctgaat

SEQ ID NO: 1911 - protein, 7 aa, synthetic construct
  REGION 1..7: note = n-mer motif
NTVTNIL

SEQ ID NO: 1912 - DNA, 21 bp, synthetic construct
  misc_feature 1..21: note = n-mer motif encoding polynucleotide
  source 1..21: mol_type = other DNA
aacaccgtcacgaacatcctc

SEQ ID NO: 1913 - protein, 7 aa, synthetic construct
  REGION 1..7: note = n-mer motif
KSHSENN

SEQ ID NO: 1914 - DNA, 21 bp, synthetic construct
  misc_feature 1..21: note = n-mer motif encoding polynucleotide
  source 1..21: mol_type = other DNA
aaatcacactcagaaaacaac

SEQ ID NO: 1915 - protein, 7 aa, synthetic construct
  REGION 1..7: note = n-mer motif
RNHDLTH

SEQ ID NO: 1916 - DNA, 21 bp, synthetic construct
  misc_feature 1..21: note = n-mer motif encoding polynucleotide
  source 1..21: mol_type = other DNA
aggaatcatgatctgactcat

SEQ ID NO: 1917 - protein, 7 aa, synthetic construct
  REGION 1..7: note = n-mer motif
VKDGPGT

SEQ ID NO: 1918 - DNA, 21 bp, synthetic construct
  misc_feature 1..21: note = n-mer motif encoding polynucleotide
  source 1..21: mol_type = other DNA
gtgaaagacggacccggtacg

SEQ ID NO: 1919 - protein, 7 aa, synthetic construct
  REGION 1..7: note = n-mer motif
VVVGNVK

SEQ ID NO: 1920 - DNA, 21 bp, synthetic construct
  misc_feature 1..21: note = n-mer motif encoding polynucleotide
  source 1..21: mol_type = other DNA
gttgttgttggtaatgtgaag

SEQ ID NO: 1921 - protein, 7 aa, synthetic construct
  REGION 1..7: note = n-mer motif
AGGGDTR

SEQ ID NO: 1922 - DNA, 21 bp, synthetic construct
  misc_feature 1..21: note = n-mer motif encoding polynucleotide
  source 1..21: mol_type = other DNA
gctggtgggggcgacacacgt

SEQ ID NO: 1923 - protein, 7 aa, synthetic construct
  REGION 1..7: note = n-mer motif
KSISGEW

SEQ ID NO: 1924 - DNA, 21 bp, synthetic construct
  misc_feature 1..21: note = n-mer motif encoding polynucleotide
  source 1..21: mol_type = other DNA
aagagtatttcgggtgagtgg

SEQ ID NO: 1925 - protein, 7 aa, synthetic construct
  REGION 1..7: note = n-mer motif
ASADSRS

SEQ ID NO: 1926 - DNA, 21 bp, synthetic construct
  misc_feature 1..21: note = n-mer motif encoding polynucleotide
  source 1..21: mol_type = other DNA
gcttcggcggattctcgtagt

SEQ ID NO: 1927 - protein, 7 aa, synthetic construct
  REGION 1..7: note = n-mer motif
SVAQNQT

SEQ ID NO: 1928 - DNA, 21 bp, synthetic construct
  misc_feature 1..21: note = n-mer motif encoding polynucleotide
  source 1..21: mol_type = other DNA
tccgtagctcaaaaccaaact

SEQ ID NO: 1929 - protein, 7 aa, synthetic construct
  REGION 1..7: note = n-mer motif
DRASSDA

SEQ ID NO: 1930 - DNA, 21 bp, synthetic construct
  misc_feature 1..21: note = n-mer motif encoding polynucleotide
  source 1..21: mol_type = other DNA
gacagggcttcatcagacgcc

SEQ ID NO: 1931 - protein, 7 aa, synthetic construct
  REGION 1..7: note = n-mer motif
PVRDTKT

SEQ ID NO: 1932 - DNA, 21 bp, synthetic construct
  misc_feature 1..21: note = n-mer motif encoding polynucleotide
  source 1..21: mol_type = other DNA
ccggtgcgtgatactaagact

SEQ ID NO: 1933 - protein, 7 aa, synthetic construct
  REGION 1..7: note = n-mer motif
GVGNTNI

SEQ ID NO: 1934 - DNA, 21 bp, synthetic construct
  misc_feature 1..21: note = n-mer motif encoding polynucleotide
  source 1..21: mol_type = other DNA
ggtgtggggaatactaatatt

SEQ ID NO: 1935 - protein, 7 aa, synthetic construct
  REGION 1..7: note = n-mer motif
GARLTYT

SEQ ID NO: 1936 - DNA, 21 bp, synthetic construct
  misc_feature 1..21: note = n-mer motif encoding polynucleotide
  source 1..21: mol_type = other DNA
ggagcccgcctcacttacaca

SEQ ID NO: 1937 - protein, 7 aa, synthetic construct
  REGION 1..7: note = n-mer motif
TSLGLMV

SEQ ID NO: 1938 - DNA, 21 bp, synthetic construct
  misc_feature 1..21: note = n-mer motif encoding polynucleotide
  source 1..21: mol_type = other DNA
acgagtctgggtcttatggtg

SEQ ID NO: 1939 - protein, 7 aa, synthetic construct
  REGION 1..7: note = n-mer motif
KAVDNGL

SEQ ID NO: 1940 - DNA, 21 bp, synthetic construct
  misc_feature 1..21: note = n-mer motif encoding polynucleotide
  source 1..21: mol_type = other DNA
aaggctgttgataatgggctg

SEQ ID NO: 1941 - protein, 7 aa, synthetic construct
  REGION 1..7: note = n-mer motif
AHEAGSR

SEQ ID NO: 1942 - DNA, 21 bp, synthetic construct
  misc_feature 1..21: note = n-mer motif encoding polynucleotide
  source 1..21: mol_type = other DNA
gctcatgaggcgggtagtcgt

SEQ ID NO: 1943 - protein, 7 aa, synthetic construct
  REGION 1..7: note = n-mer motif
ASQDRGL

SEQ ID NO: 1944 - DNA, 21 bp, synthetic construct
  misc_feature 1..21: note = n-mer motif encoding polynucleotide
  source 1..21: mol_type = other DNA
gcttcgcaggatagggggttg

SEQ ID NO: 1945 - protein, 7 aa, synthetic construct
  REGION 1..7: note = n-mer motif
SVTDIKH

SEQ ID NO: 1946 - DNA, 21 bp, synthetic construct
  misc_feature 1..21: note = n-mer motif encoding polynucleotide
  source 1..21: mol_type = other DNA
tctgttactgatattaagcat

SEQ ID NO: 1947 - protein, 7 aa, synthetic construct
  REGION 1..7: note = n-mer motif
ISNGTER

SEQ ID NO: 1948 - DNA, 21 bp, synthetic construct
  misc_feature 1..21: note = n-mer motif encoding polynucleotide
  source 1..21: mol_type = other DNA
atatcaaacggaacagaacgc

SEQ ID NO: 1949 - protein, 7 aa, synthetic construct
  REGION 1..7: note = n-mer motif
GHQNGGI

SEQ ID NO: 1950 - DNA, 21 bp, synthetic construct
  misc_feature 1..21: note = n-mer motif encoding polynucleotide
  source 1..21: mol_type = other DNA
gggcaccaaaacggcggaatc

SEQ ID NO: 1951 - protein, 7 aa, synthetic construct
  REGION 1..7: note = n-mer motif
GNGTGVI

SEQ ID NO: 1952 - DNA, 21 bp, synthetic construct
  misc_feature 1..21: note = n-mer motif encoding polynucleotide
  source 1..21: mol_type = other DNA
ggtaatgggactggtgtgatt

SEQ ID NO: 1953 - protein, 7 aa, synthetic construct
  REGION 1..7: note = n-mer motif
AKTNDSN

SEQ ID NO: 1954 - DNA, 21 bp, synthetic construct
  misc_feature 1..21: note = n-mer motif
  source 1..21: mol_type = other DNA
gcgaagacgaatgatagtaat

SEQ ID NO: 1955 - protein, 7 aa, synthetic construct
  REGION 1..7: note = n-mer motif
GMATQTT

SEQ ID NO: 1956 - DNA, 21 bp, synthetic construct
  misc_feature 1..21: note = n-mer motif encoding polynucleotide
  source 1..21: mol_type = other DNA
gggatggctactcagacgact

SEQ ID NO: 1957 - protein, 7 aa, synthetic construct
  REGION 1..7: note = n-mer motif
SSDTTLR

SEQ ID NO: 1958 - DNA, 21 bp, synthetic construct
  misc_feature 1..21: note = n-mer motif
  source 1..21: mol_type = other DNA
agttcggatactactttgcgt

SEQ ID NO: 1959 - protein, 7 aa, synthetic construct
  REGION 1..7: note = n-mer motif
LVDDKAH

SEQ ID NO: 1960 - DNA, 21 bp, synthetic construct
  misc_feature 1..21: note = n-mer motif
  source 1..21: mol_type = other DNA
ttggttgatgataaggcgcat

SEQ ID NO: 1961 - protein, 7 aa, synthetic construct
  REGION 1..7: note = n-mer motif
TLAISQP

SEQ ID NO: 1962 - DNA, 21 bp, synthetic construct
  misc_feature 1..21: note = n-mer motif encoding polynucleotide
  source 1..21: mol_type = other DNA
accttagccatatcgcaacct

SEQ ID NO: 1963 - protein, 7 aa, synthetic construct
  REGION 1..7: note = n-mer motif
AGFSSQS

SEQ ID NO: 1964 - DNA, 21 bp, synthetic construct
  misc_feature 1..21: note = n-mer motif encoding polynucleotide
  source 1..21: mol_type = other DNA
gcggggtttagttctcagtcg

SEQ ID NO: 1965 - protein, 7 aa, synthetic construct
  REGION 1..7: note = n-mer motif
ILIGTSP

SEQ ID NO: 1966 - DNA, 21 bp, synthetic construct
  misc_feature 1..21: note = n-mer motif encoding polynucleotide
  source 1..21: mol_type = other DNA
attcttattggtacttcgccg

SEQ ID NO: 1967 - protein, 7 aa, synthetic construct
  REGION 1..7: note = n-mer motif
SMESSSR

SEQ ID NO: 1968 - DNA, 21 bp, synthetic construct
  misc_feature 1..21: note = n-mer motif encoding polynucleotide
  source 1..21: mol_type = other DNA
tctatggaaagcagttcgcgt

SEQ ID NO: 1969 - protein, 7 aa, synthetic construct
  REGION 1..7: note = n-mer motif
ARSEFKT

SEQ ID NO: 1970 - DNA, 21 bp, synthetic construct
  misc_feature 1..21: note = n-mer motif encoding polynucleotide
  source 1..21: mol_type = other DNA
gcgaggtctgagtttaagact

SEQ ID NO: 1971 - protein, 7 aa, synthetic construct
  REGION 1..7: note = n-mer motif
NKSDHEF

SEQ ID NO: 1972 - DNA, 21 bp, synthetic construct
  misc_feature 1..21: note = n-mer motif encoding polynucleotide
  source 1..21: mol_type = other DNA
aacaaatcagaccacgaattc

SEQ ID NO: 1973 - protein, 7 aa, synthetic construct
  REGION 1..7: note = n-mer motif
VEVPTAN

SEQ ID NO: 1974 - DNA, 21 bp, synthetic construct
  misc_feature 1..21: note = n-mer motif encoding polynucleotide
  source 1..21: mol_type = other DNA
gttgaagtgccaacagcgaac

SEQ ID NO: 1975 - protein, 7 aa, synthetic construct
  REGION 1..7: note = n-mer motif
LLTSAVA

SEQ ID NO: 1976 - DNA, 21 bp, synthetic construct
  misc_feature 1..21: note = n-mer motif encoding polynucleotide
  source 1..21: mol_type = other DNA
ctgcttacatcggctgttgcc

SEQ ID NO: 1977 - protein, 7 aa, synthetic construct
  REGION 1..7: note = n-mer motif
MGGVSNP

SEQ ID NO: 1978 - DNA, 21 bp, synthetic construct
  misc_feature 1..21: note = n-mer motif encoding polynucleotide
  source 1..21: mol_type = other DNA
atggggggggttagtaatccg

SEQ ID NO: 1979 - protein, 7 aa, synthetic construct
  REGION 1..7: note = n-mer motif
LGDSASP

SEQ ID NO: 1980 - DNA, 21 bp, synthetic construct
  misc_feature 1..21: note = n-mer motif encoding polynucleotide
  source 1..21: mol_type = other DNA
cttggggattctgcttcgccg

SEQ ID NO: 1981 - protein, 7 aa, synthetic construct
  REGION 1..7: note = n-mer motif
MVGGGVS

SEQ ID NO: 1982 - DNA, 21 bp, synthetic construct
  misc_feature 1..21: note = n-mer motif encoding polynucleotide
  source 1..21: mol_type = other DNA
atggtgggtggtggggtgtcg

SEQ ID NO: 1983 - protein, 7 aa, synthetic construct
  REGION 1..7: note = n-mer motif
ASQLTQT

SEQ ID NO: 1984 - DNA, 21 bp, synthetic construct
  misc_feature 1..21: note = n-mer motif encoding polynucleotide
  source 1..21: mol_type = other DNA
gcgtctcagcttactcagact

SEQ ID NO: 1985 - protein, 7 aa, synthetic construct
  REGION 1..7: note = n-mer motif
LSNMMSV

SEQ ID NO: 1986 - DNA, 21 bp, synthetic construct
  misc_feature 1..21: note = n-mer motif encoding polynucleotide
  source 1..21: mol_type = other DNA
ctgtctaatatgatgagtgtt

SEQ ID NO: 1987 - protein, 7 aa, synthetic construct
  REGION 1..7: note = n-mer motif
MYVAHSS

SEQ ID NO: 1988 - DNA, 21 bp, synthetic construct
  misc_feature 1..21: note = n-mer motif encoding polynucleotide
  source 1..21: mol_type = other DNA
atgtatgttgctcatagttcg

SEQ ID NO: 1989 - protein, 7 aa, synthetic construct
  REGION 1..7: note = n-mer motif
THDPIQR

SEQ ID NO: 1990 - DNA, 21 bp, synthetic construct
  misc_feature 1..21: note = n-mer motif encoding polynucleotide
  source 1..21: mol_type = other DNA
actcatgatccgattcagcgt

SEQ ID NO: 1991 - protein, 7 aa, synthetic construct
  REGION 1..7: note = n-mer motif
HQDRTTL

SEQ ID NO: 1992 - DNA, 21 bp, synthetic construct
  misc_feature 1..21: note = n-mer motif encoding polynucleotide
  source 1..21: mol_type = other DNA
catcaggataggacgacgctt

SEQ ID NO: 1993 - protein, 7 aa, synthetic construct
  REGION 1..7: note = n-mer motif
GTLERTA

SEQ ID NO: 1994 - DNA, 21 bp, synthetic construct
  misc_feature 1..21: note = n-mer motif encoding polynucleotide
  source 1..21: mol_type = other DNA
gggacgttggaacgtacggcc

SEQ ID NO: 1995 - protein, 7 aa, synthetic construct
  REGION 1..7: note = n-mer motif
IVDVTAR

SEQ ID NO: 1996 - DNA, 21 bp, synthetic construct
  misc_feature 1..21: note = n-mer motif encoding polynucleotide
  source 1..21: mol_type = other DNA
atagtggacgttactgctcgg

SEQ ID NO: 1997 - protein, 7 aa, synthetic construct
  REGION 1..7: note = n-mer motif
IFNTTNT

SEQ ID NO: 1998 - DNA, 21 bp, synthetic construct
  misc_feature 1..21: note = n-mer motif encoding polynucleotide
  source 1..21: mol_type = other DNA
atttttaatactacgaatact

SEQ ID NO: 1999 - protein, 7 aa, synthetic construct
  REGION 1..7: note = n-mer motif
AKLLDSL

SEQ ID NO: 2000 - DNA, 21 bp, synthetic construct
  misc_feature 1..21: note = n-mer motif encoding polynucleotide
  source 1..21: mol_type = other DNA
gcaaaactcctcgacagcctt

SEQ ID NO: 2001 - protein, 7 aa, synthetic construct
  REGION 1..7: note = n-mer motif
WDDSKDR

SEQ ID NO: 2002 - DNA, 21 bp, synthetic construct
  misc_feature 1..21: note = n-mer motif encoding polynucleotide
  source 1..21: mol_type = other DNA
tgggacgactcaaaagacaga

SEQ ID NO: 2003 - protein, 7 aa, synthetic construct
  REGION 1..7: note = n-mer motif
MLRGYSQ

SEQ ID NO: 2004 - DNA, 21 bp, synthetic construct
  misc_feature 1..21: note = n-mer motif encoding polynucleotide
  source 1..21: mol_type = other DNA
atgcttaggggttatagtcag

SEQ ID NO: 2005 - protein, 7 aa, synthetic construct
  REGION 1..7: note = n-mer motif
QDGMLTR

SEQ ID NO: 2006 - DNA, 21 bp, synthetic construct
  misc_feature 1..21: note = n-mer motif encoding polynucleotide
  source 1..21: mol_type = other DNA
caagacggtatgttgacaagg

SEQ ID NO: 2007 - protein, 7 aa, synthetic construct
  REGION 1..7: note = n-mer motif
LANMLNV

SEQ ID NO: 2008 - DNA, 21 bp, synthetic construct
  misc_feature 1..21: note = n-mer motif encoding polynucleotide
  source 1..21: mol_type = other DNA
ctggctaatatgttgaatgtt

SEQ ID NO: 2009 - protein, 7 aa, synthetic construct
  REGION 1..7: note = n-mer motif
PYEGAGT

SEQ ID NO: 2010 - DNA, 21 bp, synthetic construct
  misc_feature 1..21: note = n-mer motif encoding polynucleotide
  source 1..21: mol_type = other DNA
ccgtacgaaggcgcaggtact

SEQ ID NO: 2011 - protein, 7 aa, synthetic construct
  REGION 1..7: note = n-mer motif
MDGKSPP

SEQ ID NO: 2012 - DNA, 21 bp, synthetic construct
  misc_feature 1..21: note = n-mer motif encoding polynucleotide
  source 1..21: mol_type = other DNA
atggatgggaagtcgccgccg

SEQ ID NO: 2013 - protein, 7 aa, synthetic construct
  REGION 1..7: note = n-mer motif
GQAGTYS

SEQ ID NO: 2014 - DNA, 21 bp, synthetic construct
  misc_feature 1..21: note = n-mer motif encoding polynucleotide
  source 1..21: mol_type = other DNA
ggccaagcgggtacctactcg

SEQ ID NO: 2015 - protein, 7 aa, synthetic construct
  REGION 1..7: note = n-mer motif
MDGKSPT

SEQ ID NO: 2016 - DNA, 21 bp, synthetic construct
  misc_feature 1..21: note = n-mer motif encoding polynucleotide
  source 1..21: mol_type = other DNA
atggacggaaaaagtccaaca

SEQ ID NO: 2017 - protein, 7 aa, synthetic construct
  REGION 1..7: note = n-mer motif
VMTVETS

SEQ ID NO: 2018 - DNA, 21 bp, synthetic construct
  misc_feature 1..21: note = n-mer motif encoding polynucleotide
  source 1..21: mol_type = other DNA
gtgatgaccgtcgaaacctcg

SEQ ID NO: 2019 - protein, 7 aa, synthetic construct
  REGION 1..7: note = n-mer motif
VQMTLHK

SEQ ID NO: 2020 - DNA, 21 bp, synthetic construct
  misc_feature 1..21: note = n-mer motif encoding polynucleotide
  source 1..21: mol_type = other DNA
gttcagatgacgcttcataag

SEQ ID NO: 2021 - protein, 7 aa, synthetic construct
  REGION 1..7: note = n-mer motif
VEWKHPL

SEQ ID NO: 2022 - DNA, 21 bp, synthetic construct
  misc_feature 1..21: note = n-mer motif encoding polynucleotide
  source 1..21: mol_type = other DNA
gtggagtggaagcatcctttg

SEQ ID NO: 2023 - protein, 7 aa, synthetic construct
  REGION 1..7: note = n-mer motif
RGAESSE

SEQ ID NO: 2024 - DNA, 21 bp, synthetic construct
  misc_feature 1..21: note = n-mer motif encoding polynucleotide
  source 1..21: mol_type = other DNA
cgtggtgccgaaagcagtgaa

SEQ ID NO: 2025 - protein, 7 aa, synthetic construct
  REGION 1..7: note = n-mer motif
LSNMLSV

SEQ ID NO: 2026 - DNA, 21 bp, synthetic construct
  misc_feature 1..21: note = n-mer motif encoding polynucleotide
  source 1..21: mol_type = other DNA
ctgtctaatatgttgagtgtt

SEQ ID NO: 2027 - protein, 7 aa, synthetic construct
  REGION 1..7: note = n-mer motif
ELVATTI

SEQ ID NO: 2028 - DNA, 21 bp, synthetic construct
  misc_feature 1..21: note = n-mer motif encoding polynucleotide
  source 1..21: mol_type = other DNA
gagcttgtggctactactatt

SEQ ID NO: 2029 - protein, 7 aa, synthetic construct
  REGION 1..7: note = n-mer motif
LAGLGGP

SEQ ID NO: 2030 - DNA, 21 bp, synthetic construct
  misc_feature 1..21: note = n-mer motif encoding polynucleotide
  source 1..21: mol_type = other DNA
ctcgcaggccttggtggcccc

SEQ ID NO: 2031 - protein, 7 aa, synthetic construct
  REGION 1..7: note = n-mer motif
RISHEGT

SEQ ID NO: 2032 - DNA, 21 bp, synthetic construct
  misc_feature 1..21: note = n-mer motif encoding polynucleotide
  source 1..21: mol_type = other DNA
cgcatatcccacgaaggaact

SEQ ID NO: 2033 - protein, 7 aa, synthetic construct
  REGION 1..7: note = n-mer motif
TAAGIDR

SEQ ID NO: 2034 - DNA, 21 bp, synthetic construct
  misc_feature 1..21: note = n-mer motif encoding polynucleotide
  source 1..21: mol_type = other DNA
actgctgcggggattgatcgg

SEQ ID NO: 2035 - protein, 7 aa, synthetic construct
  REGION 1..7: note = n-mer motif
FAEVAQA

SEQ ID NO: 2036 - DNA, 21 bp, synthetic construct
  misc_feature 1..21: note = n-mer motif encoding polynucleotide
  source 1..21: mol_type = other DNA
ttcgccgaagtagcccaagct

SEQ ID NO: 2037 - protein, 7 aa, synthetic construct
  REGION 1..7: note = n-mer motif
GPAEGQG

SEQ ID NO: 2038 - DNA, 21 bp, synthetic construct
  misc_feature 1..21: note = n-mer motif encoding polynucleotide
  source 1..21: mol_type = other DNA
gggccagccgaaggacaaggt

SEQ ID NO: 2039 - protein, 7 aa, synthetic construct
  REGION 1..7: note = n-mer motif
GAADRQI

SEQ ID NO: 2040 - DNA, 21 bp, synthetic construct
  misc_feature 1..21: note = n-mer motif encoding polynucleotide
  source 1..21: mol_type = other DNA
ggcgcagcagaccgacaaata

SEQ ID NO: 2041 - protein, 7 aa, synthetic construct
  REGION 1..7: note = n-mer motif
AVSGYTV

SEQ ID NO: 2042 - DNA, 21 bp, synthetic construct
  misc_feature 1..21: note = n-mer motif encoding polynucleotide
  source 1..21: mol_type = other DNA
gcagtgtcagggtacacggtt

SEQ ID NO: 2043 - protein, 7 aa, synthetic construct
  REGION 1..7: note = n-mer motif
IANLADS

SEQ ID NO: 2044 - DNA, 21 bp, synthetic construct
  misc_feature 1..21: note = n-mer motif encoding polynucleotide
  source 1..21: mol_type = other DNA
attgcgaatcttgctgattcg

SEQ ID NO: 2045 - protein, 7 aa, synthetic construct
  REGION 1..7: note = n-mer motif
TSYDKLV

SEQ ID NO: 2046 - DNA, 21 bp, synthetic construct
  misc_feature 1..21: note = n-mer motif encoding polynucleotide
  source 1..21: mol_type = other DNA
acgtcgtatgataagttggtt

SEQ ID NO: 2047 - protein, 7 aa, synthetic construct
  REGION 1..7: note = n-mer motif
FQDTIGV

SEQ ID NO: 2048 - DNA, 21 bp, synthetic construct
  misc_feature 1..21: note = n-mer motif encoding polynucleotide
  source 1..21: mol_type = other DNA
tttcaggatacgattggggtg

SEQ ID NO: 2049 - protein, 7 aa, synthetic construct
  REGION 1..7: note = n-mer motif
TNGGEGA

SEQ ID NO: 2050 - DNA, 21 bp, synthetic construct
  misc_feature 1..21: note = n-mer motif encoding polynucleotide
  source 1..21: mol_type = other DNA
actaatgggggtgagggggcg

SEQ ID NO: 2051 - protein, 7 aa, synthetic construct
  REGION 1..7: note = n-mer motif
IAQNTPY

SEQ ID NO: 2052 - DNA, 21 bp, synthetic construct
  misc_feature 1..21: note = n-mer motif encoding polynucleotide
  source 1..21: mol_type = other DNA
atcgcacaaaacacaccctac

SEQ ID NO: 2053 - protein, 7 aa, synthetic construct
  REGION 1..7: note = n-mer motif
QVHDTKT

SEQ ID NO: 2054 - DNA, 21 bp, synthetic construct
  misc_feature 1..21: note = n-mer motif encoding polynucleotide
  source 1..21: mol_type = other DNA
caagtccacgacacaaaaacg

SEQ ID NO: 2055 - protein, 7 aa, synthetic construct
  REGION 1..7: note = n-mer motif
RLNEHEA

SEQ ID NO: 2056 - DNA, 21 bp, synthetic construct
  misc_feature 1..21: note = n-mer motif encoding polynucleotide
  source 1..21: mol_type = other DNA
cgtctgaatgagcatgaggcg

SEQ ID NO: 2057 - protein, 7 aa, synthetic construct
  REGION 1..7: note = n-mer motif
AGSGTEV

SEQ ID NO: 2058 - DNA, 21 bp, synthetic construct
  misc_feature 1..21: note = n-mer motif encoding polynucleotide
  source 1..21: mol_type = other DNA
gcgggttctgggactgaggtt

SEQ ID NO: 2059 - protein, 7 aa, synthetic construct
  REGION 1..7: note = n-mer motif
IVIAEIH

SEQ ID NO: 2060 - DNA, 21 bp, synthetic construct
  misc_feature 1..21: note = n-mer motif encoding polynucleotide
  source 1..21: mol_type = other DNA
attgtgattgctgagattcat

SEQ ID NO: 2061 - protein, 7 aa, synthetic construct
  REGION 1..7: note = n-mer motif
QVRETKT

SEQ ID NO: 2062 - DNA, 21 bp, synthetic construct
  misc_feature 1..21: note = n-mer motif encoding polynucleotide
  source 1..21: mol_type = other DNA
caagttagggaaaccaaaacc

SEQ ID NO: 2063 - protein, 7 aa, synthetic construct
  REGION 1..7: note = n-mer motif
SVNSGLL

SEQ ID NO: 2064 - DNA, 21 bp, synthetic construct
  misc_feature 1..21: note = n-mer motif encoding polynucleotide
  source 1..21: mol_type = other DNA
agtgttaatagtgggctgctt

SEQ ID NO: 2065 - protein, 7 aa, synthetic construct
  REGION 1..7: note = n-mer motif
VGVNGSH

SEQ ID NO: 2066 - DNA, 21 bp, synthetic construct
  misc_feature 1..21: note = n-mer motif encoding polynucleotide
  source 1..21: mol_type = other DNA
gtgggtgtgaatggttctcat

SEQ ID NO: 2067 - protein, 7 aa, synthetic construct
  REGION 1..7: note = n-mer motif
AAAQSAT

SEQ ID NO: 2068 - DNA, 21 bp, synthetic construct
  misc_feature 1..21: note = n-mer motif encoding polynucleotide
  source 1..21: mol_type = other DNA
gcagcagcacaatcggcaacg

SEQ ID NO: 2069 - protein, 7 aa, synthetic construct
  REGION 1..7: note = n-mer motif
SKAEGPV

SEQ ID NO: 2070 - DNA, 21 bp, synthetic construct
  misc_feature 1..21: note = n-mer motif encoding polynucleotide
  source 1..21: mol_type = other DNA
tcgaaggctgagggtccggtt

SEQ ID NO: 2071 - protein, 7 aa, synthetic construct
  REGION 1..7: note = n-mer motif
AGLQVSI

SEQ ID NO: 2072 - DNA, 21 bp, synthetic construct
  misc_feature 1..21: note = n-mer motif encoding polynucleotide
  source 1..21: mol_type = other DNA
gccggtttacaagtcagcatc

SEQ ID NO: 2073 - protein, 7 aa, synthetic construct
  REGION 1..7: note = n-mer motif
QNERITV

SEQ ID NO: 2074 - DNA, 21 bp, synthetic construct
  misc_feature 1..21: note = n-mer motif encoding polynucleotide
  source 1..21: mol_type = other DNA
cagaatgagaggattactgtg

SEQ ID NO: 2075 - protein, 7 aa, synthetic construct
  REGION 1..7: note = n-mer motif
QEKGTST

SEQ ID NO: 2076 - DNA, 21 bp, synthetic construct
  misc_feature 1..21: note = n-mer motif encoding polynucleotide
  source 1..21: mol_type = other DNA
caagaaaaaggaacctcgacg

SEQ ID NO: 2077 - protein, 7 aa, synthetic construct
  REGION 1..7: note = n-mer motif
SHGSDSK

SEQ ID NO: 2078 - DNA, 21 bp, synthetic construct
  misc_feature 1..21: note = n-mer motif encoding polynucleotide
  source 1..21: mol_type = other DNA
tcgcacggctccgactctaaa

SEQ ID NO: 2079 - protein, 7 aa, synthetic construct
  REGION 1..7: note = n-mer motif
RMENGNT

SEQ ID NO: 2080 - DNA, 21 bp, synthetic construct
  misc_feature 1..21: note = n-mer motif encoding polynucleotide
  source 1..21: mol_type = other DNA
agaatggaaaacggtaacacc

SEQ ID NO: 2081 - protein, 7 aa, synthetic construct
  REGION 1..7: note = n-mer motif
LGVEVGA

SEQ ID NO: 2082 - DNA, 21 bp, synthetic construct
  misc_feature 1..21: note = n-mer motif encoding polynucleotide
  source 1..21: mol_type = other DNA
ttgggtgtggaggttggggcg

SEQ ID NO: 2083 - protein, 7 aa, synthetic construct
  REGION 1..7: note = n-mer motif
TTGPSNA

SEQ ID NO: 2084 - DNA, 21 bp, synthetic construct
  misc_feature 1..21: note = n-mer motif encoding polynucleotide
  source 1..21: mol_type = other DNA
actactgggccgagtaacgcc

SEQ ID NO: 2085 - protein, 7 aa, synthetic construct
  REGION 1..7: note = n-mer motif
RDLDGKY

SEQ ID NO: 2086 - DNA, 21 bp, synthetic construct
  misc_feature 1..21: note = n-mer motif encoding polynucleotide
  source 1..21: mol_type = other DNA
agggaccttgacggaaaatac

SEQ ID NO: 2087 - protein, 7 aa, synthetic construct
  REGION 1..7: note = n-mer motif
MDTHTNT

SEQ ID NO: 2088 - DNA, 21 bp, synthetic construct
  misc_feature 1..21: note = n-mer motif encoding polynucleotide
  source 1..21: mol_type = other DNA
atggacacccacacaaacaca

SEQ ID NO: 2089 - protein, 7 aa, synthetic construct
  REGION 1..7: note = n-mer motif
SLINTGS

SEQ ID NO: 2090 - DNA, 21 bp, synthetic construct
  misc_feature 1..21: note = n-mer motif encoding polynucleotide
  source 1..21: mol_type = other DNA
tcactcatcaacacaggttct

SEQ ID NO: 2091 - protein, 7 aa, synthetic construct
  REGION 1..7: note = n-mer motif
KSISGEW

SEQ ID NO: 2092 - DNA, 21 bp, synthetic construct
  misc_feature 1..21: note = n-mer motif encoding polynucleotide
  source 1..21: mol_type = other DNA
aaaagcatctctggcgaatgg

SEQ ID NO: 2093 - protein, 7 aa, synthetic construct
  REGION 1..7: note = n-mer motif
GVNHAVA

SEQ ID NO: 2094 - DNA, 21 bp, synthetic construct
  misc_feature 1..21: note = n-mer motif encoding polynucleotide
  source 1..21: mol_type = other DNA
ggtgttaatcatgcggtggct

SEQ ID NO: 2095 - protein, 7 aa, synthetic construct
  REGION 1..7: note = n-mer motif
AGEHYQA

SEQ ID NO: 2096 - DNA, 21 bp, synthetic construct
  misc_feature 1..21: note = n-mer motif encoding polynucleotide
  source 1..21: mol_type = other DNA
gcaggcgaacactaccaagcg

SEQ ID NO: 2097 - protein, 7 aa, synthetic construct
  REGION 1..7: note = n-mer motif
TTGLTGS

SEQ ID NO: 2098 - DNA, 21 bp, synthetic construct
  misc_feature 1..21: note = n-mer motif encoding polynucleotide
  source 1..21: mol_type = other DNA
acgacggggctgactggtagt

SEQ ID NO: 2099 - protein, 7 aa, synthetic construct
  REGION 1..7: note = n-mer motif
PTQGTLQ

SEQ ID NO: 2100 - DNA, 21 bp, synthetic construct
  misc_feature 1..21: note = n-mer motif encoding polynucleotide
  source 1..21: mol_type = other DNA
ccgacccaaggtaccttgcaa

SEQ ID NO: 2101 - protein, 7 aa, synthetic construct
  REGION 1..7: note = n-mer motif
GGTQAVL

SEQ ID NO: 2102 - DNA, 21 bp, synthetic construct
  misc_feature 1..21: note = n-mer motif encoding polynucleotide
  source 1..21: mol_type = other DNA
ggtgggactcaggctgtgctg

SEQ ID NO: 2103 - protein, 7 aa, synthetic construct
  REGION 1..7: note = n-mer motif
AADVILN

SEQ ID NO: 2104 - DNA, 21 bp, synthetic construct
  misc_feature 1..21: note = n-mer motif encoding polynucleotide
  source 1..21: mol_type = other DNA
gctgccgacgtcatccttaac

SEQ ID NO: 2105 - protein, 7 aa, synthetic construct
  REGION 1..7: note = n-mer motif
ITTGPGG

SEQ ID NO: 2106 - DNA, 21 bp, synthetic construct
  misc_feature 1..21: note = n-mer motif encoding polynucleotide
  source 1..21: mol_type = other DNA
attacgacgggtcctgggggt

SEQ ID NO: 2107 - protein, 7 aa, synthetic construct
  REGION 1..7: note = n-mer motif
TTLAGPA

SEQ ID NO: 2108 - DNA, 21 bp, synthetic construct
  misc_feature 1..21: note = n-mer motif encoding polynucleotide
  source 1..21: mol_type = other DNA
actactctggctggtcctgcg

SEQ ID NO: 2109 - protein, 7 aa, synthetic construct
  REGION 1..7: note = n-mer motif
NNGTLPI

SEQ ID NO: 2110 - DNA, 21 bp, synthetic construct
  misc_feature 1..21: note = n-mer motif encoding polynucleotide
  source 1..21: mol_type = other DNA
aataatggtactttgccgatt

SEQ ID NO: 2111 - protein, 7 aa, synthetic construct
  REGION 1..7: note = n-mer motif
IDSLNSV

SEQ ID NO: 2112 - DNA, 21 bp, synthetic construct
  misc_feature 1..21: note = n-mer motif encoding polynucleotide
  source 1..21: mol_type = other DNA
atagacagtctgaactccgtc

SEQ ID NO: 2113 - protein, 7 aa, synthetic construct
  REGION 1..7: note = n-mer motif
GAASSTK

SEQ ID NO: 2114 - DNA, 21 bp, synthetic construct
  misc_feature 1..21: note = n-mer motif encoding polynucleotide
  source 1..21: mol_type = other DNA
ggcgcagcatcgtccacaaaa

SEQ ID NO: 2115 - protein, 7 aa, synthetic construct
  REGION 1..7: note = n-mer motif
ELRVKDT

SEQ ID NO: 2116 - DNA, 21 bp, synthetic construct
  misc_feature 1..21: note = n-mer motif encoding polynucleotide
  source 1..21: mol_type = other DNA
gagcttagggttaaggatact

SEQ ID NO: 2117 - protein, 7 aa, synthetic construct
  REGION 1..7: note = n-mer motif
MGASATL

SEQ ID NO: 2118 - DNA, 21 bp, synthetic construct
  misc_feature 1..21: note = n-mer motif encoding polynucleotide
  source 1..21: mol_type = other DNA
atgggtgcatccgcaaccttg

SEQ ID NO: 2119 - protein, 7 aa, synthetic construct
  REGION 1..7: note = n-mer motif
YGTVVET

SEQ ID NO: 2120 - DNA, 21 bp, synthetic construct
  misc_feature 1..21: note = n-mer motif encoding polynucleotide
  source 1..21: mol_type = other DNA
tacggaacagtggtggaaacg

SEQ ID NO: 2121 - protein, 7 aa, synthetic construct
  REGION 1..7: note = n-mer motif
GTLVSEL

SEQ ID NO: 2122 - DNA, 21 bp, synthetic construct
  misc_feature 1..21: note = n-mer motif encoding polynucleotide
  source 1..21: mol_type = other DNA
ggtacgttggtgtcggagctg

SEQ ID NO: 2123 - protein, 7 aa, synthetic construct
  REGION 1..7: note = n-mer motif
ATGTESR

SEQ ID NO: 2124 - DNA, 21 bp, synthetic construct
  misc_feature 1..21: note = n-mer motif encoding polynucleotide
  source 1..21: mol_type = other DNA
gcaacagggaccgaatcaagg

SEQ ID NO: 2125 - protein, 7 aa, synthetic construct
  REGION 1..7: note = n-mer motif
NGGIGGF

SEQ ID NO: 2126 - DNA, 21 bp, synthetic construct
  misc_feature 1..21: note = n-mer motif encoding polynucleotide
  source 1..21: mol_type = other DNA
aatggtgggattggtggtttt

SEQ ID NO: 2127 - protein, 7 aa, synthetic construct
  REGION 1..7: note = n-mer motif
LADNHGR

SEQ ID NO: 2128 - DNA, 21 bp, synthetic construct
  misc_feature 1..21: note = n-mer motif encoding polynucleotide
  source 1..21: mol_type = other DNA
ctggcggataatcatggtagg

SEQ ID NO: 2129 - protein, 7 aa, synthetic construct
  REGION 1..7: note = n-mer motif
TSASVSQ

SEQ ID NO: 2130 - DNA, 21 bp, synthetic construct
  misc_feature 1..21: note = n-mer motif encoding polynucleotide
  source 1..21: mol_type = other DNA
acttctgcttctgtttctcag

SEQ ID NO: 2131 - protein, 7 aa, synthetic construct
  REGION 1..7: note = n-mer motif
GNSGGDF

SEQ ID NO: 2132 - DNA, 21 bp, synthetic construct
  misc_feature 1..21: note = n-mer motif encoding polynucleotide
  source 1..21: mol_type = other DNA
ggaaacagcggtggggacttc

SEQ ID NO: 2133 - protein, 7 aa, synthetic construct
  REGION 1..7: note = n-mer motif
TYEDLRV

SEQ ID NO: 2134 - DNA, 21 bp, synthetic construct
  misc_feature 1..21: note = n-mer motif encoding polynucleotide
  source 1..21: mol_type = other DNA
acttatgaggatcttagggtg

SEQ ID NO: 2135 - protein, 7 aa, synthetic construct
  REGION 1..7: note = n-mer motif
RDASITI

SEQ ID NO: 2136 - DNA, 21 bp, synthetic construct
  misc_feature 1..21: note = n-mer motif encoding polynucleotide
  source 1..21: mol_type = other DNA
cgagacgcctcgataacaata

SEQ ID NO: 2137 - protein, 7 aa, synthetic construct
  REGION 1..7: note = n-mer motif
GAQVNGT

SEQ ID NO: 2138 - DNA, 21 bp, synthetic construct
  misc_feature 1..21: note = n-mer motif encoding polynucleotide
  source 1..21: mol_type = other DNA
ggtgcacaagtaaacggtaca

SEQ ID NO: 2139 - protein, 7 aa, synthetic construct
  REGION 1..7: note = n-mer motif
RMTGDLT

SEQ ID NO: 2140 - DNA, 21 bp, synthetic construct
  misc_feature 1..21: note = n-mer motif encoding polynucleotide
  source 1..21: mol_type = other DNA
aggatgacgggtgatttgact

SEQ ID NO: 2141 - protein, 7 aa, synthetic construct
  REGION 1..7: note = n-mer motif
ITSEPLP

SEQ ID NO: 2142 - DNA, 21 bp, synthetic construct
  misc_feature 1..21: note = n-mer motif encoding polynucleotide
  source 1..21: mol_type = other DNA
atcacatccgaacccctacct

SEQ ID NO: 2143 - protein, 7 aa, synthetic construct
  REGION 1..7: note = n-mer motif
TLAISEL

SEQ ID NO: 2144 - DNA, 21 bp, synthetic construct
  misc_feature 1..21: note = n-mer motif encoding polynucleotide
  source 1..21: mol_type = other DNA
acgcttgctatcagcgaattg

SEQ ID NO: 2145 - protein, 7 aa, synthetic construct
  REGION 1..7: note = n-mer motif
ASLLNKT

SEQ ID NO: 2146 - DNA, 21 bp, synthetic construct
  misc_feature 1..21: note = n-mer motif encoding polynucleotide
  source 1..21: mol_type = other DNA
gccagcttactcaacaaaacg

SEQ ID NO: 2147 - protein, 7 aa, synthetic construct
  REGION 1..7: note = n-mer motif
RDYAEQP

SEQ ID NO: 2148 - DNA, 21 bp, synthetic construct
  misc_feature 1..21: note = n-mer motif
  source 1..21: mol_type = other DNA
cgcgactacgctgaacaacct

SEQ ID NO: 2149 - protein, 7 aa, synthetic construct
  REGION 1..7: note = n-mer motif
ARVDTGI

SEQ ID NO: 2150 - DNA, 21 bp, synthetic construct
  misc_feature 1..21: note = n-mer motif encoding polynucleotide
  source 1..21: mol_type = other DNA
gcgcgtgtagacacggggata

SEQ ID NO: 2151 - protein, 7 aa, synthetic construct
  REGION 1..7: note = n-mer motif
EGKTQLQ

SEQ ID NO: 2152 - DNA, 21 bp, synthetic construct
  misc_feature 1..21: note = n-mer motif encoding polynucleotide
  source 1..21: mol_type = other DNA
gagggtaagactcagctgcag

SEQ ID NO: 2153 - protein, 7 aa, synthetic construct
  REGION 1..7: note = n-mer motif
VGNDERP

SEQ ID NO: 2154 - DNA, 21 bp, synthetic construct
  misc_feature 1..21: note = n-mer motif encoding polynucleotide
  source 1..21: mol_type = other DNA
gttgggaatgatgagcgtccg

SEQ ID NO: 2155 - protein, 7 aa, synthetic construct
  REGION 1..7: note = n-mer motif
LSLSKDK

SEQ ID NO: 2156 - DNA, 21 bp, synthetic construct
  misc_feature 1..21: note = n-mer motif encoding polynucleotide
  source 1..21: mol_type = other DNA
ctgagtcttagtaaggataag

SEQ ID NO: 2157 - protein, 7 aa, synthetic construct
  REGION 1..7: note = n-mer motif
ISLDATS

SEQ ID NO: 2158 - DNA, 21 bp, synthetic construct
  misc_feature 1..21: note = n-mer motif
  source 1..21: mol_type = other DNA
ataagcctcgacgctacatct

SEQ ID NO: 2159 - protein, 7 aa, synthetic construct
  REGION 1..7: note = n-mer motif
GTMSPGA

SEQ ID NO: 2160 - DNA, 21 bp, synthetic construct
  misc_feature 1..21: note = n-mer motif encoding polynucleotide
  source 1..21: mol_type = other DNA
ggtactatgtctcctggggct

SEQ ID NO: 2161 - protein, 7 aa, synthetic construct
  REGION 1..7: note = n-mer motif
GSGERPV

SEQ ID NO: 2162 - DNA, 21 bp, synthetic construct
  misc_feature 1..21: note = n-mer motif encoding polynucleotide
  source 1..21: mol_type = other DNA
ggaagtggtgaaaggccggta

SEQ ID NO: 2163 - protein, 7 aa, synthetic construct
  REGION 1..7: note = n-mer motif
AGEHYQA

SEQ ID NO: 2164 - DNA, 21 bp, synthetic construct
  misc_feature 1..21: note = n-mer motif encoding polynucleotide
  source 1..21: mol_type = other DNA
gcgggtgagcattatcaggct

SEQ ID NO: 2165 - protein, 7 aa, synthetic construct
  REGION 1..7: note = n-mer motif
RNEGINQ

SEQ ID NO: 2166 - DNA, 21 bp, synthetic construct
  misc_feature 1..21: note = n-mer motif encoding polynucleotide
  source 1..21: mol_type = other DNA
cgtaatgagggtattaatcag

SEQ ID NO: 2167 - protein, 7 aa, synthetic construct
  REGION 1..7: note = n-mer motif
GMGASSK

SEQ ID NO: 2168 - DNA, 21 bp, synthetic construct
  misc_feature 1..21: note = n-mer motif encoding polynucleotide
  source 1..21: mol_type = other DNA
ggtatgggggcgtcttctaag

SEQ ID NO: 2169 - protein, 7 aa, synthetic construct
  REGION 1..7: note = n-mer motif
QLVAQDR

SEQ ID NO: 2170 - DNA, 21 bp, synthetic construct
  misc_feature 1..21: note = n-mer motif encoding polynucleotide
  source 1..21: mol_type = other DNA
cagttggtggcgcaggatcgg

SEQ ID NO: 2171 - protein, 7 aa, synthetic construct
  REGION 1..7: note = n-mer motif
TTADIVR

SEQ ID NO: 2172 - DNA, 21 bp, synthetic construct
  misc_feature 1..21: note = n-mer motif encoding polynucleotide
  source 1..21: mol_type = other DNA
acgacggcggatattgttagg

SEQ ID NO: 2173 - protein, 7 aa, synthetic construct
  REGION 1..7: note = n-mer motif
YTVTGTI

SEQ ID NO: 2174 - DNA, 21 bp, synthetic construct
  misc_feature 1..21: note = n-mer motif encoding polynucleotide
  source 1..21: mol_type = other DNA
tacaccgtaactggcacaatc

SEQ ID NO: 2175 - protein, 7 aa, synthetic construct
  REGION 1..7: note = n-mer motif
GNGTGVL

SEQ ID NO: 2176 - DNA, 21 bp, synthetic construct
  misc_feature 1..21: note = n-mer motif encoding polynucleotide
  source 1..21: mol_type = other DNA
ggtaatgggactggtgtgctt

SEQ ID NO: 2177 - protein, 7 aa, synthetic construct
  REGION 1..7: note = n-mer motif
PIHGASS

SEQ ID NO: 2178 - DNA, 21 bp, synthetic construct
  misc_feature 1..21: note = n-mer motif encoding polynucleotide
  source 1..21: mol_type = other DNA
ccaatacacggggcgtcatct

SEQ ID NO: 2179 - protein, 7 aa, synthetic construct
  REGION 1..7: note = n-mer motif
DSHASGD

SEQ ID NO: 2180 - DNA, 21 bp, synthetic construct
  misc_feature 1..21: note = n-mer motif encoding polynucleotide
  source 1..21: mol_type = other DNA
gatagtcatgcgtcgggggat

SEQ ID NO: 2181 - protein, 7 aa, synthetic construct
  REGION 1..7: note = n-mer motif
PNERHTV

SEQ ID NO: 2182 - DNA, 21 bp, synthetic construct
  misc_feature 1..21: note = n-mer motif encoding polynucleotide
  source 1..21: mol_type = other DNA
ccgaatgagaggcatactgtg

SEQ ID NO: 2183 - protein, 7 aa, synthetic construct
  REGION 1..7: note = n-mer motif
NRLGDRL

SEQ ID NO: 2184 - DNA, 21 bp, synthetic construct
  misc_feature 1..21: note = n-mer motif encoding polynucleotide
  source 1..21: mol_type = other DNA
aacaggctgggcgaccgacta

SEQ ID NO: 2185 - protein, 7 aa, synthetic construct
  REGION 1..7: note = n-mer motif
LLQSLND

SEQ ID NO: 2186 - DNA, 21 bp, synthetic construct
  misc_feature 1..21: note = n-mer motif encoding polynucleotide
  source 1..21: mol_type = other DNA
ctcctacaatcgctgaacgac

SEQ ID NO: 2187 - protein, 7 aa, synthetic construct
  REGION 1..7: note = n-mer motif
DRAELRL

SEQ ID NO: 2188 - DNA, 21 bp, synthetic construct
  misc_feature 1..21: note = n-mer motif encoding polynucleotide
  source 1..21: mol_type = other DNA
gaccgggcagaactaaggctt

SEQ ID NO: 2189 - protein, 7 aa, synthetic construct
  REGION 1..7: note = n-mer motif
RNFSVVL

SEQ ID NO: 2190 - DNA, 21 bp, synthetic construct
  misc_feature 1..21: note = n-mer motif encoding polynucleotide
  source 1..21: mol_type = other DNA
cggaacttcagtgtagtactg

SEQ ID NO: 2191 - protein, 7 aa, synthetic construct
  REGION 1..7: note = n-mer motif
IAGVPQA

SEQ ID NO: 2192 - DNA, 21 bp, synthetic construct
  misc_feature 1..21: note = n-mer motif encoding polynucleotide
  source 1..21: mol_type = other DNA
attgcgggggttccgcaggcg

SEQ ID NO: 2193 - protein, 7 aa, synthetic construct
  REGION 1..7: note = n-mer motif
EPSLSSP

SEQ ID NO: 2194 - DNA, 21 bp, synthetic construct
  misc_feature 1..21: note = n-mer motif encoding polynucleotide
  source 1..21: mol_type = other DNA
gagccgtctctgagttctccg

SEQ ID NO: 2195 - protein, 7 aa, synthetic construct
  REGION 1..7: note = n-mer motif
LNGGHVM

SEQ ID NO: 2196 - DNA, 21 bp, synthetic construct
  misc_feature 1..21: note = n-mer motif encoding polynucleotide
  source 1..21: mol_type = other DNA
ttgaatgggggtcatgttatg

SEQ ID NO: 2197 - protein, 7 aa, synthetic construct
  REGION 1..7: note = n-mer motif
RDLNSDV

SEQ ID NO: 2198 - DNA, 21 bp, synthetic construct
  misc_feature 1..21: note = n-mer motif encoding polynucleotide
  source 1..21: mol_type = other DNA
agggaccttaactcggacgtc

SEQ ID NO: 2199 - protein, 7 aa, synthetic construct
  REGION 1..7: note = n-mer motif
PGQHNQA

SEQ ID NO: 2200 - DNA, 21 bp, synthetic construct
  misc_feature 1..21: note = n-mer motif encoding polynucleotide
  source 1..21: mol_type = other DNA
ccaggacaacacaaccaagcc

SEQ ID NO: 2201 - protein, 7 aa, synthetic construct
  REGION 1..7: note = n-mer motif
GVEGSGM

SEQ ID NO: 2202 - DNA, 21 bp, synthetic construct
  misc_feature 1..21: note = n-mer motif encoding polynucleotide
  source 1..21: mol_type = other DNA
ggggtggaaggctccggaatg

SEQ ID NO: 2203 - protein, 7 aa, synthetic construct
  REGION 1..7: note = n-mer motif
QADNNGR

SEQ ID NO: 2204 - DNA, 21 bp, synthetic construct
  misc_feature 1..21: note = n-mer motif encoding polynucleotide
  source 1..21: mol_type = other DNA
caagctgacaacaacggccgc

SEQ ID NO: 2205 - protein, 7 aa, synthetic construct
  REGION 1..7: note = n-mer motif
ADAGIMM

SEQ ID NO: 2206 - DNA, 21 bp, synthetic construct
  misc_feature 1..21: note = n-mer motif encoding polynucleotide
  source 1..21: mol_type = other DNA
gcggacgccggcatcatgatg

SEQ ID NO: 2207 - protein, 7 aa, synthetic construct
  REGION 1..7: note = n-mer motif
DRADDSR

SEQ ID NO: 2208 - DNA, 21 bp, synthetic construct
  misc_feature 1..21: note = n-mer motif encoding polynucleotide
  source 1..21: mol_type = other DNA
gatagggctgatgattctcgt

SEQ ID NO: 2209 - protein, 7 aa, synthetic construct
  REGION 1..7: note = n-mer motif
DQTYTSA

SEQ ID NO: 2210 - DNA, 21 bp, synthetic construct
  misc_feature 1..21: note = n-mer motif encoding polynucleotide
  source 1..21: mol_type = other DNA
gaccaaacatacacaagcgcg

SEQ ID NO: 2211 - protein, 7 aa, synthetic construct
  REGION 1..7: note = n-mer motif
GVRDTNI

SEQ ID NO: 2212 - DNA, 21 bp, synthetic construct
  misc_feature 1..21: note = n-mer motif encoding polynucleotide
  source 1..21: mol_type = other DNA
ggagttcgagacacaaacata

SEQ ID NO: 2213 - protein, 7 aa, synthetic construct
  REGION 1..7: note = n-mer motif
MSVATQR

SEQ ID NO: 2214 - DNA, 21 bp, synthetic construct
  misc_feature 1..21: note = n-mer motif encoding polynucleotide
  source 1..21: mol_type = other DNA
atgtcagtcgcgactcaacga

SEQ ID NO: 2215 - protein, 7 aa, synthetic construct
  REGION 1..7: note = n-mer motif
PALEANI

SEQ ID NO: 2216 - DNA, 21 bp, synthetic construct
  misc_feature 1..21: note = n-mer motif encoding polynucleotide
  source 1..21: mol_type = other DNA
ccggctcttgaggctaatatt

SEQ ID NO: 2217 - protein, 7 aa, synthetic construct
  REGION 1..7: note = n-mer motif
VLNEHVA

SEQ ID NO: 2218 - DNA, 21 bp, synthetic construct
  misc_feature 1..21: note = n-mer motif encoding polynucleotide
  source 1..21: mol_type = other DNA
gtccttaacgaacacgtagct

SEQ ID NO: 2219 - protein, 7 aa, synthetic construct
  REGION 1..7: note = n-mer motif
GLNEHQA

SEQ ID NO: 2220 - DNA, 21 bp, synthetic construct
  misc_feature 1..21: note = n-mer motif encoding polynucleotide
  source 1..21: mol_type = other DNA
ggtctgaatgagcatcaggcg

SEQ ID NO: 2221 - protein, 7 aa, synthetic construct
  REGION 1..7: note = n-mer motif
SLDSLTS

SEQ ID NO: 2222 - DNA, 21 bp, synthetic construct
  misc_feature 1..21: note = n-mer motif encoding polynucleotide
  source 1..21: mol_type = other DNA
agtttagacagcttaaccagt

SEQ ID NO: 2223 - protein, 7 aa, synthetic construct
  REGION 1..7: note = n-mer motif
WTDRESL

SEQ ID NO: 2224 - DNA, 21 bp, synthetic construct
  misc_feature 1..21: note = n-mer motif encoding polynucleotide
  source 1..21: mol_type = other DNA
tggactgatcgggagtcgctg

SEQ ID NO: 2225 - protein, 7 aa, synthetic construct
  REGION 1..7: note = n-mer motif
DVGTGAL

SEQ ID NO: 2226 - DNA, 21 bp, synthetic construct
  misc_feature 1..21: note = n-mer motif encoding polynucleotide
  source 1..21: mol_type = other DNA
gatgttgggactggggcgttg

SEQ ID NO: 2227 - protein, 7 aa, synthetic construct
  REGION 1..7: note = n-mer motif
VGHVESP

SEQ ID NO: 2228 - DNA, 21 bp, synthetic construct
  misc_feature 1..21: note = n-mer motif encoding polynucleotide
  source 1..21: mol_type = other DNA
gtaggccacgtcgaatctcca

SEQ ID NO: 2229 - protein, 7 aa, synthetic construct
  REGION 1..7: note = n-mer motif
KGSDTAM

SEQ ID NO: 2230 - DNA, 21 bp, synthetic construct
  misc_feature 1..21: note = n-mer motif encoding polynucleotide
  source 1..21: mol_type = other DNA
aaagggtcagacacagccatg

SEQ ID NO: 2231 - protein, 7 aa, synthetic construct
  REGION 1..7: note = n-mer motif
KLSSEKT

SEQ ID NO: 2232 - DNA, 21 bp, synthetic construct
  misc_feature 1..21: note = n-mer motif encoding polynucleotide
  source 1..21: mol_type = other DNA
aagctttcgagtgagaagact

SEQ ID NO: 2233 - protein, 7 aa, synthetic construct
  REGION 1..7: note = n-mer motif
VGLSRDL

SEQ ID NO: 2234 - DNA, 21 bp, synthetic construct
  misc_feature 1..21: note = n-mer motif encoding polynucleotide
  source 1..21: mol_type = other DNA
gttgggctgagtcgggatctg

SEQ ID NO: 2235 - protein, 7 aa, synthetic construct
  REGION 1..7: note = n-mer motif
VSNAVGQ

SEQ ID NO: 2236 - DNA, 21 bp, synthetic construct
  misc_feature 1..21: note = n-mer motif encoding polynucleotide
  source 1..21: mol_type = other DNA
gtttcgaatgctgtgggtcag

SEQ ID NO: 2237 - protein, 7 aa, synthetic construct
  REGION 1..7: note = n-mer motif
LSNHGSV

SEQ ID NO: 2238 - DNA, 21 bp, synthetic construct
  misc_feature 1..21: note = n-mer motif encoding polynucleotide
  source 1..21: mol_type = other DNA
ttgagcaaccacggatcggta

SEQ ID NO: 2239 - protein, 7 aa, synthetic construct
  REGION 1..7: note = n-mer motif
GAPSLGD

SEQ ID NO: 2240 - DNA, 21 bp, synthetic construct
  misc_feature 1..21: note = n-mer motif encoding polynucleotide
  source 1..21: mol_type = other DNA
ggggcgccgtcgttgggtgat

SEQ ID NO: 2241 - protein, 7 aa, synthetic construct
  REGION 1..7: note = n-mer motif
MNGAHVL

SEQ ID NO: 2242 - DNA, 21 bp, synthetic construct
  misc_feature 1..21: note = n-mer motif encoding polynucleotide
  source 1..21: mol_type = other DNA
atgaacggcgcgcacgtattg

SEQ ID NO: 2243 - protein, 7 aa, synthetic construct
  REGION 1..7: note = n-mer motif
NGNMASY

SEQ ID NO: 2244 - DNA, 21 bp, synthetic construct
  misc_feature 1..21: note = n-mer motif encoding polynucleotide
  source 1..21: mol_type = other DNA
aacggaaacatggcaagttac

SEQ ID NO: 2245 - protein, 7 aa, synthetic construct
  REGION 1..7: note = n-mer motif
IAQMHSS

SEQ ID NO: 2246 - DNA, 21 bp, synthetic construct
  misc_feature 1..21: note = n-mer motif encoding polynucleotide
  source 1..21: mol_type = other DNA
atcgcacaaatgcacagttcc

SEQ ID NO: 2247 - protein, 7 aa, synthetic construct
  REGION 1..7: note = n-mer motif
PTTLGHD

SEQ ID NO: 2248 - DNA, 21 bp, synthetic construct
  misc_feature 1..21: note = n-mer motif encoding polynucleotide
  source 1..21: mol_type = other DNA
ccgacaactctcggacacgac

SEQ ID NO: 2249 - protein, 7 aa, synthetic construct
  REGION 1..7: note = n-mer motif
QANMLSD

SEQ ID NO: 2250 - DNA, 21 bp, synthetic construct
  misc_feature 1..21: note = n-mer motif encoding polynucleotide
  source 1..21: mol_type = other DNA
caagccaacatgctctcagac

SEQ ID NO: 2251 - protein, 7 aa, synthetic construct
  REGION 1..7: note = n-mer motif
WANGNTV

SEQ ID NO: 2252 - DNA, 21 bp, synthetic construct
  misc_feature 1..21: note = n-mer motif encoding polynucleotide
  source 1..21: mol_type = other DNA
tgggcgaatgggaatacggtg

SEQ ID NO: 2253 - protein, 7 aa, synthetic construct
  REGION 1..7: note = n-mer motif
EEKSASY

SEQ ID NO: 2254 - DNA, 21 bp, synthetic construct
  misc_feature 1..21: note = n-mer motif encoding polynucleotide
  source 1..21: mol_type = other DNA
gaggagaagtcggcttcttat

SEQ ID NO: 2255 - protein, 7 aa, synthetic construct
  REGION 1..7: note = n-mer motif
VSPAASV

SEQ ID NO: 2256 - DNA, 21 bp, synthetic construct
  misc_feature 1..21: note = n-mer motif encoding polynucleotide
  source 1..21: mol_type = other DNA
gttagtcctgctgcgagtgtt

SEQ ID NO: 2257 - protein, 7 aa, synthetic construct
  REGION 1..7: note = n-mer motif
ARSLGEV

SEQ ID NO: 2258 - DNA, 21 bp, synthetic construct
  misc_feature 1..21: note = n-mer motif encoding polynucleotide
  source 1..21: mol_type = other DNA
gcgaggtcgcttggggaggtt

SEQ ID NO: 2259 - protein, 7 aa, synthetic construct
  REGION 1..7: note = n-mer motif
MDVSSGP

SEQ ID NO: 2260 - DNA, 21 bp, synthetic construct
  misc_feature 1..21: note = n-mer motif encoding polynucleotide
  source 1..21: mol_type = other DNA
atggatgtgagtagtggtccg

SEQ ID NO: 2261 - protein, 7 aa, synthetic construct
  REGION 1..7: note = n-mer motif
ISNYTRL

SEQ ID NO: 2262 - DNA, 21 bp, synthetic construct
  misc_feature 1..21: note = n-mer motif encoding polynucleotide
  source 1..21: mol_type = other DNA
atatctaactacacgcggctt

SEQ ID NO: 2263 - protein, 7 aa, synthetic construct
  REGION 1..7: note = n-mer motif
PDERLTV

SEQ ID NO: 2264 - DNA, 21 bp, synthetic construct
  misc_feature 1..21: note = n-mer motif encoding polynucleotide
  source 1..21: mol_type = other DNA
cctgacgaacggctaacggtt

SEQ ID NO: 2265 - protein, 7 aa, synthetic construct
  REGION 1..7: note = n-mer motif
TDALKSK

SEQ ID NO: 2266 - DNA, 21 bp, synthetic construct
  misc_feature 1..21: note = n-mer motif encoding polynucleotide
  source 1..21: mol_type = other DNA
accgacgccctaaaaagcaaa

SEQ ID NO: 2267 - protein, 7 aa, synthetic construct
  REGION 1..7: note = n-mer motif
ATDSTQS

SEQ ID NO: 2268 - DNA, 21 bp, synthetic construct
  misc_feature 1..21: note = n-mer motif encoding polynucleotide
  source 1..21: mol_type = other DNA
gccaccgacagcactcaaagc

SEQ ID NO: 2269 - protein, 7 aa, synthetic construct
  REGION 1..7: note = n-mer motif
SSLLTTA

SEQ ID NO: 2270 - DNA, 21 bp, synthetic construct
  misc_feature 1..21: note = n-mer motif encoding polynucleotide
  source 1..21: mol_type = other DNA
tcgtcgttgctgactactgct

SEQ ID NO: 2271 - protein, 7 aa, synthetic construct
  REGION 1..7: note = n-mer motif
VLTSPGP

SEQ ID NO: 2272 - DNA, 21 bp, synthetic construct
  misc_feature 1..21: note = n-mer motif encoding polynucleotide
  source 1..21: mol_type = other DNA
gttctgacttcgcctggtcct

SEQ ID NO: 2273 - protein, 7 aa, synthetic construct
  REGION 1..7: note = n-mer motif
DSHVSGM

SEQ ID NO: 2274 - DNA, 21 bp, synthetic construct
  misc_feature 1..21: note = n-mer motif encoding polynucleotide
  source 1..21: mol_type = other DNA
gatagtcatgtgtcggggatg

SEQ ID NO: 2275 - protein, 7 aa, synthetic construct
  REGION 1..7: note = n-mer motif
NDSAANS

SEQ ID NO: 2276 - DNA, 21 bp, synthetic construct
  misc_feature 1..21: note = n-mer motif encoding polynucleotide
  source 1..21: mol_type = other DNA
aacgactctgctgcgaactcc

SEQ ID NO: 2277 - protein, 7 aa, synthetic construct
  REGION 1..7: note = n-mer motif
ALGVAVA

SEQ ID NO: 2278 - DNA, 21 bp, synthetic construct
  misc_feature 1..21: note = n-mer motif encoding polynucleotide
  source 1..21: mol_type = other DNA
gctcttggggttgctgttgct

SEQ ID NO: 2279 - protein, 7 aa, synthetic construct
  REGION 1..7: note = n-mer motif
GTAGHMS

SEQ ID NO: 2280 - DNA, 21 bp, synthetic construct
  misc_feature 1..21: note = n-mer motif encoding polynucleotide
  source 1..21: mol_type = other DNA
gggactgctgggcatatgtcg

SEQ ID NO: 2281 - protein, 7 aa, synthetic construct
  REGION 1..7: note = n-mer motif
NNLGDRL

SEQ ID NO: 2282 - DNA, 21 bp, synthetic construct
  misc_feature 1..21: note = n-mer motif encoding polynucleotide
  source 1..21: mol_type = other DNA
aacaacctgggcgacaggctc

SEQ ID NO: 2283 - protein, 7 aa, synthetic construct
  REGION 1..7: note = n-mer motif
LGAGSPN

SEQ ID NO: 2284 - DNA, 21 bp, synthetic construct
  misc_feature 1..21: note = n-mer motif encoding polynucleotide
  source 1..21: mol_type = other DNA
ctaggcgccggaagcccgaac

SEQ ID NO: 2285 - protein, 7 aa, synthetic construct
  REGION 1..7: note = n-mer motif
SGSNTGT

SEQ ID NO: 2286 - DNA, 21 bp, synthetic construct
  misc_feature 1..21: note = n-mer motif encoding polynucleotide
  source 1..21: mol_type = other DNA
tcggggtctaatacgggtact

SEQ ID NO: 2287 - protein, 7 aa, synthetic construct
  REGION 1..7: note = n-mer motif
GVGASEK

SEQ ID NO: 2288 - DNA, 21 bp, synthetic construct
  misc_feature 1..21: note = n-mer motif encoding polynucleotide
  source 1..21: mol_type = other DNA
ggtgtgggggctagtgagaag

SEQ ID NO: 2289 - protein, 7 aa, synthetic construct
  REGION 1..7: note = n-mer motif
MSNVGTW

SEQ ID NO: 2290 - DNA, 21 bp, synthetic construct
  misc_feature 1..21: note = n-mer motif encoding polynucleotide
  source 1..21: mol_type = other DNA
atgagtaacgtaggcacatgg

SEQ ID NO: 2291 - protein, 7 aa, synthetic construct
  REGION 1..7: note = n-mer motif
IVMAENN

SEQ ID NO: 2292 - DNA, 21 bp, synthetic construct
  misc_feature 1..21: note = n-mer motif encoding polynucleotide
  source 1..21: mol_type = other DNA
atcgtaatggcggaaaacaac

SEQ ID NO: 2293 - protein, 7 aa, synthetic construct
  REGION 1..7: note = n-mer motif
HVDLGTK

SEQ ID NO: 2294 - DNA, 21 bp, synthetic construct
  misc_feature 1..21: note = n-mer motif encoding polynucleotide
  source 1..21: mol_type = other DNA
cacgttgacttaggcacaaaa

SEQ ID NO: 2295 - protein, 7 aa, synthetic construct
  REGION 1..7: note = n-mer motif
PNERVTV

SEQ ID NO: 2296 - DNA, 21 bp, synthetic construct
  misc_feature 1..21: note = n-mer motif encoding polynucleotide
  source 1..21: mol_type = other DNA
ccgaatgagagggttactgtg

SEQ ID NO: 2297 - protein, 7 aa, synthetic construct
  REGION 1..7: note = n-mer motif
DRDTNPY

SEQ ID NO: 2298 - DNA, 21 bp, synthetic construct
  misc_feature 1..21: note = n-mer motif encoding polynucleotide
  source 1..21: mol_type = other DNA
gaccgagacaccaacccatac

SEQ ID NO: 2299 - protein, 7 aa, synthetic construct
  REGION 1..7: note = n-mer motif
DGGLPKS

SEQ ID NO: 2300 - DNA, 21 bp, synthetic construct
  misc_feature 1..21: note = n-mer motif encoding polynucleotide
  source 1..21: mol_type = other DNA
gacggaggcttacccaaaagc

SEQ ID NO: 2301 - protein, 7 aa, synthetic construct
  REGION 1..7: note = n-mer motif
RISQDGD

SEQ ID NO: 2302 - DNA, 21 bp, synthetic construct
  misc_feature 1..21: note = n-mer motif encoding polynucleotide
  source 1..21: mol_type = other DNA
agaatatcccaagacggagac

SEQ ID NO: 2303 - protein, 7 aa, synthetic construct
  REGION 1..7: note = n-mer motif
AVLAGTR

SEQ ID NO: 2304 - DNA, 21 bp, synthetic construct
  misc_feature 1..21: note = n-mer motif encoding polynucleotide
  source 1..21: mol_type = other DNA
gcggttctggcggggactagg

SEQ ID NO: 2305 - protein, 7 aa, synthetic construct
  REGION 1..7: note = n-mer motif
KASDTPM

SEQ ID NO: 2306 - DNA, 21 bp, synthetic construct
  misc_feature 1..21: note = n-mer motif encoding polynucleotide
  source 1..21: mol_type = other DNA
aaagcaagtgacacgcccatg

SEQ ID NO: 2307 - protein, 7 aa, synthetic construct
  REGION 1..7: note = n-mer motif
GNDVGRS

SEQ ID NO: 2308 - DNA, 21 bp, synthetic construct
  misc_feature 1..21: note = n-mer motif encoding polynucleotide
  source 1..21: mol_type = other DNA
gggaacgacgtaggccgctcg

SEQ ID NO: 2309 - protein, 7 aa, synthetic construct
  REGION 1..7: note = n-mer motif
STLSGTD

SEQ ID NO: 2310 - DNA, 21 bp, synthetic construct
  misc_feature 1..21: note = n-mer motif encoding polynucleotide
  source 1..21: mol_type = other DNA
tcgacgctgtctggtactgat

SEQ ID NO: 2311 - protein, 7 aa, synthetic construct
  REGION 1..7: note = n-mer motif
FSSEQLT

SEQ ID NO: 2312 - DNA, 21 bp, synthetic construct
  misc_feature 1..21: note = n-mer motif encoding polynucleotide
  source 1..21: mol_type = other DNA
ttttcgtctgagcagcttacg

SEQ ID NO: 2313 - protein, 7 aa, synthetic construct
  REGION 1..7: note = n-mer motif
SHLGDRL

SEQ ID NO: 2314 - DNA, 21 bp, synthetic construct
  misc_feature 1..21: note = n-mer motif encoding polynucleotide
  source 1..21: mol_type = other DNA
agtcatcttggtgatcgtttg

SEQ ID NO: 2315 - protein, 7 aa, synthetic construct
  REGION 1..7: note = n-mer motif
AVKEYQS

SEQ ID NO: 2316 - DNA, 21 bp, synthetic construct
  misc_feature 1..21: note = n-mer motif encoding polynucleotide
  source 1..21: mol_type = other DNA
gctgttaaagaataccaatct

SEQ ID NO: 2317 - protein, 7 aa, synthetic construct
  REGION 1..7: note = n-mer motif
MGTPTNT

SEQ ID NO: 2318 - DNA, 21 bp, synthetic construct
  misc_feature 1..21: note = n-mer motif encoding polynucleotide
  source 1..21: mol_type = other DNA
atgggtactcctacgaatacg

SEQ ID NO: 2319 - protein, 7 aa, synthetic construct
  REGION 1..7: note = n-mer motif
QSLATGI

SEQ ID NO: 2320 - DNA, 21 bp, synthetic construct
  misc_feature 1..21: note = n-mer motif encoding polynucleotide
  source 1..21: mol_type = other DNA
cagtcgcttgctactgggatt

SEQ ID NO: 2321 - protein, 7 aa, synthetic construct
  REGION 1..7: note = n-mer motif
PGVAMVS

SEQ ID NO: 2322 - DNA, 21 bp, synthetic construct
  misc_feature 1..21: note = n-mer motif encoding polynucleotide
  source 1..21: mol_type = other DNA
cctggggtagcaatggtatct

SEQ ID NO: 2323 - protein, 7 aa, synthetic construct
  REGION 1..7: note = n-mer motif
SAETRNG

SEQ ID NO: 2324 - DNA, 21 bp, synthetic construct
  misc_feature 1..21: note = n-mer motif encoding polynucleotide
  source 1..21: mol_type = other DNA
tctgcggagactaggaatggg

SEQ ID NO: 2325 - protein, 7 aa, synthetic construct
  REGION 1..7: note = n-mer motif
EGGYSGR

SEQ ID NO: 2326 - DNA, 21 bp, synthetic construct
  misc_feature 1..21: note = n-mer motif encoding polynucleotide
  source 1..21: mol_type = other DNA
gagggtggttatagtgggcgt

SEQ ID NO: 2327 - protein, 7 aa, synthetic construct
  REGION 1..7: note = n-mer motif
ETEASSR

SEQ ID NO: 2328 - DNA, 21 bp, synthetic construct
  misc_feature 1..21: note = n-mer motif encoding polynucleotide
  source 1..21: mol_type = other DNA
gagacggaggcgagttcgcgt

SEQ ID NO: 2329 - protein, 7 aa, synthetic construct
  REGION 1..7: note = n-mer motif
STHHTST

SEQ ID NO: 2330 - DNA, 21 bp, synthetic construct
  misc_feature 1..21: note = n-mer motif encoding polynucleotide
  source 1..21: mol_type = other DNA
tcgacgcaccacaccagtacg

SEQ ID NO: 2331 - protein, 7 aa, synthetic construct
  REGION 1..7: note = n-mer motif
REMPLSH

SEQ ID NO: 2332 - DNA, 21 bp, synthetic construct
  misc_feature 1..21: note = n-mer motif encoding polynucleotide
  source 1..21: mol_type = other DNA
agggagatgcctttgagtcat

SEQ ID NO: 2333 - protein, 7 aa, synthetic construct
  REGION 1..7: note = n-mer motif
RELQSAA

SEQ ID NO: 2334 - DNA, 21 bp, synthetic construct
  misc_feature 1..21: note = n-mer motif
  source 1..21: mol_type = other DNA
cgcgaattacaaagcgcagct

SEQ ID NO: 2335 - protein, 7 aa, synthetic construct
  REGION 1..7: note = n-mer motif
GSGSGVL

SEQ ID NO: 2336 - DNA, 21 bp, synthetic construct
  misc_feature 1..21: note = n-mer motif encoding polynucleotide
  source 1..21: mol_type = other DNA
ggttctgggtcgggggtgctg

SEQ ID NO: 2337 - protein, 7 aa, synthetic construct
  REGION 1..7: note = n-mer motif
GVLTTVT

SEQ ID NO: 2338 - DNA, 21 bp, synthetic construct
  misc_feature 1..21: note = n-mer motif encoding polynucleotide
  source 1..21: mol_type = other DNA
ggagtcttgaccactgttacg

SEQ ID NO: 2339 - protein, 7 aa, synthetic construct
  REGION 1..7: note = n-mer motif
NLQGNAH

SEQ ID NO: 2340 - DNA, 21 bp, synthetic construct
  misc_feature 1..21: note = n-mer motif encoding polynucleotide
  source 1..21: mol_type = other DNA
aatctgcagggtaatgctcat

SEQ ID NO: 2341 - protein, 7 aa, synthetic construct
  REGION 1..7: note = n-mer motif
AAISSQT

SEQ ID NO: 2342 - DNA, 21 bp, synthetic construct
  misc_feature 1..21: note = n-mer motif encoding polynucleotide
  source 1..21: mol_type = other DNA
gcggcgattagttctcagacg

SEQ ID NO: 2343 - protein, 7 aa, synthetic construct
  REGION 1..7: note = n-mer motif
ETTVSHV

SEQ ID NO: 2344 - DNA, 21 bp, synthetic construct
  misc_feature 1..21: note = n-mer motif encoding polynucleotide
  source 1..21: mol_type = other DNA
gagactacggtttctcatgtg

SEQ ID NO: 2345 - protein, 7 aa, synthetic construct
  REGION 1..7: note = n-mer motif
ALTNGQR

SEQ ID NO: 2346 - DNA, 21 bp, synthetic construct
  misc_feature 1..21: note = n-mer motif encoding polynucleotide
  source 1..21: mol_type = other DNA
gcactaaccaacggtcaacgt

SEQ ID NO: 2347 - protein, 7 aa, synthetic construct
  REGION 1..7: note = n-mer motif
NNNGATS

SEQ ID NO: 2348 - DNA, 21 bp, synthetic construct
  misc_feature 1..21: note = n-mer motif encoding polynucleotide
  source 1..21: mol_type = other DNA
aataataatggtgcgacttct

SEQ ID NO: 2349 - protein, 7 aa, synthetic construct
  REGION 1..7: note = n-mer motif
IDGKSPP

SEQ ID NO: 2350 - DNA, 21 bp, synthetic construct
  misc_feature 1..21: note = n-mer motif encoding polynucleotide
  source 1..21: mol_type = other DNA
attgatgggaagtcgccgccg

SEQ ID NO: 2351 - protein, 7 aa, synthetic construct
  REGION 1..7: note = n-mer motif
PTGTVVT

SEQ ID NO: 2352 - DNA, 21 bp, synthetic construct
  misc_feature 1..21: note = n-mer motif encoding polynucleotide
  source 1..21: mol_type = other DNA
ccgactgggactgttgttact

SEQ ID NO: 2353 - protein, 7 aa, synthetic construct
  REGION 1..7: note = n-mer motif
SGEQLRI

SEQ ID NO: 2354 - DNA, 21 bp, synthetic construct
  misc_feature 1..21: note = n-mer motif encoding polynucleotide
  source 1..21: mol_type = other DNA
tctggggagcagcttaggatt

SEQ ID NO: 2355 - protein, 7 aa, synthetic construct
  REGION 1..7: note = n-mer motif
AVNNVTL

SEQ ID NO: 2356 - DNA, 21 bp, synthetic construct
  misc_feature 1..21: note = n-mer motif encoding polynucleotide
  source 1..21: mol_type = other DNA
gctgtgaataatgttactctt

SEQ ID NO: 2357 - protein, 7 aa, synthetic construct
  REGION 1..7: note = n-mer motif
LSDLMRS

SEQ ID NO: 2358 - DNA, 21 bp, synthetic construct
  misc_feature 1..21: note = n-mer motif encoding polynucleotide
  source 1..21: mol_type = other DNA
cttagcgacctcatgaggtct

SEQ ID NO: 2359 - protein, 7 aa, synthetic construct
  REGION 1..7: note = n-mer motif
QYVVTGG

SEQ ID NO: 2360 - DNA, 21 bp, synthetic construct
  misc_feature 1..21: note = n-mer motif encoding polynucleotide
  source 1..21: mol_type = other DNA
cagtatgttgttactggtggg

SEQ ID NO: 2361 - protein, 7 aa, synthetic construct
  REGION 1..7: note = n-mer motif
MDGKTPP

SEQ ID NO: 2362 - DNA, 21 bp, synthetic construct
  misc_feature 1..21: note = n-mer motif encoding polynucleotide
  source 1..21: mol_type = other DNA
atggacggtaaaactccccct

SEQ ID NO: 2363 - protein, 7 aa, synthetic construct
  REGION 1..7: note = n-mer motif
IGMDPKA

SEQ ID NO: 2364 - DNA, 21 bp, synthetic construct
  misc_feature 1..21: note = n-mer motif encoding polynucleotide
  source 1..21: mol_type = other DNA
attggtatggatccgaaggcg

SEQ ID NO: 2365 - protein, 7 aa, synthetic construct
  REGION 1..7: note = n-mer motif
GVDAVAY

SEQ ID NO: 2366 - DNA, 21 bp, synthetic construct
  misc_feature 1..21: note = n-mer motif encoding polynucleotide
  source 1..21: mol_type = other DNA
ggagtggacgctgtggcatac

SEQ ID NO: 2367 - protein, 7 aa, synthetic construct
  REGION 1..7: note = n-mer motif
GNQGGTR

SEQ ID NO: 2368 - DNA, 21 bp, synthetic construct
  misc_feature 1..21: note = n-mer motif encoding polynucleotide
  source 1..21: mol_type = other DNA
ggtaatcagggggggacgcgt

SEQ ID NO: 2369 - protein, 7 aa, synthetic construct
  REGION 1..7: note = n-mer motif
ASASSPR

SEQ ID NO: 2370 - DNA, 21 bp, synthetic construct
  misc_feature 1..21: note = n-mer motif
  source 1..21: mol_type = other DNA
gcctcagcatcatcacctagg

SEQ ID NO: 2371 - protein, 7 aa, synthetic construct
  REGION 1..7: note = n-mer motif
GLSPEAR

SEQ ID NO: 2372 - DNA, 21 bp, synthetic construct
  misc_feature 1..21: note = n-mer motif
  source 1..21: mol_type = other DNA
ggtttgtctcctgaggcgcgt

SEQ ID NO: 2373 - protein, 7 aa, synthetic construct
  REGION 1..7: note = n-mer motif
LVTTLHM

SEQ ID NO: 2374 - DNA, 21 bp, synthetic construct
  misc_feature 1..21: note = n-mer motif encoding polynucleotide
  source 1..21: mol_type = other DNA
ttggtcaccacactacacatg

SEQ ID NO: 2375 - protein, 7 aa, synthetic construct
  REGION 1..7: note = n-mer motif
HAGLGII

SEQ ID NO: 2376 - DNA, 21 bp, synthetic construct
  misc_feature 1..21: note = n-mer motif encoding polynucleotide
  source 1..21: mol_type = other DNA
cacgcggggctgggcataatc

SEQ ID NO: 2377 - protein, 7 aa, synthetic construct
  REGION 1..7: note = n-mer motif
AILGASS

SEQ ID NO: 2378 - DNA, 21 bp, synthetic construct
  misc_feature 1..21: note = n-mer motif encoding polynucleotide
  source 1..21: mol_type = other DNA
gccatactaggcgcatcttcc

SEQ ID NO: 2379 - protein, 7 aa, synthetic construct
  REGION 1..7: note = n-mer motif
STHDIRV

SEQ ID NO: 2380 - DNA, 21 bp, synthetic construct
  misc_feature 1..21: note = n-mer motif encoding polynucleotide
  source 1..21: mol_type = other DNA
tctactcacgacatacgagtc

SEQ ID NO: 2381 - protein, 7 aa, synthetic construct
  REGION 1..7: note = n-mer motif
AEQLSHS

SEQ ID NO: 2382 - DNA, 21 bp, synthetic construct
  misc_feature 1..21: note = n-mer motif encoding polynucleotide
  source 1..21: mol_type = other DNA
gcagaacaactatcccacagc

SEQ ID NO: 2383 - protein, 7 aa, synthetic construct
  REGION 1..7: note = n-mer motif
LHDTLTR

SEQ ID NO: 2384 - DNA, 21 bp, synthetic construct
  misc_feature 1..21: note = n-mer motif encoding polynucleotide
  source 1..21: mol_type = other DNA
ctgcacgacacattaacccgc

SEQ ID NO: 2385 - protein, 7 aa, synthetic construct
  REGION 1..7: note = n-mer motif
PGEHYPA

SEQ ID NO: 2386 - DNA, 21 bp, synthetic construct
  misc_feature 1..21: note = n-mer motif
  source 1..21: mol_type = other DNA
cccggcgaacactacccagcg

SEQ ID NO: 2387 - protein, 7 aa, synthetic construct
  REGION 1..7: note = n-mer motif
SSGSGVA

SEQ ID NO: 2388 - DNA, 21 bp, synthetic construct
  misc_feature 1..21: note = n-mer motif
  source 1..21: mol_type = other DNA
agttctgggtcgggggtggct

SEQ ID NO: 2389 - protein, 7 aa, synthetic construct
  REGION 1..7: note = n-mer motif
MVDSAQL

SEQ ID NO: 2390 - DNA, 21 bp, synthetic construct
  misc_feature 1..21: note = n-mer motif encoding polynucleotide
  source 1..21: mol_type = other DNA
atggtggattcggcgcagctt

SEQ ID NO: 2391 - protein, 7 aa, synthetic construct
  REGION 1..7: note = n-mer motif
SGLVTEL

SEQ ID NO: 2392 - DNA, 21 bp, synthetic construct
  misc_feature 1..21: note = n-mer motif encoding polynucleotide
  source 1..21: mol_type = other DNA
agcggattggtaactgaactg

SEQ ID NO: 2393 - protein, 7 aa, synthetic construct
  REGION 1..7: note = n-mer motif
HGHIAQS

SEQ ID NO: 2394 - DNA, 21 bp, synthetic construct
  misc_feature 1..21: note = n-mer motif encoding polynucleotide
  source 1..21: mol_type = other DNA
catgggcatattgcgcagtcg

SEQ ID NO: 2395 - protein, 7 aa, synthetic construct
  REGION 1..7: note = n-mer motif
HTDGSYV

SEQ ID NO: 2396 - DNA, 21 bp, synthetic construct
  misc_feature 1..21: note = n-mer motif encoding polynucleotide
  source 1..21: mol_type = other DNA
catacggatgggagttatgtt

SEQ ID NO: 2397 - protein, 7 aa, synthetic construct
  REGION 1..7: note = n-mer motif
MAGQPSQ

SEQ ID NO: 2398 - DNA, 21 bp, synthetic construct
  misc_feature 1..21: note = n-mer motif encoding polynucleotide
  source 1..21: mol_type = other DNA
atggcgggtcagcctagtcag

SEQ ID NO: 2399 - protein, 7 aa, synthetic construct
  REGION 1..7: note = n-mer motif
PTQGTPR

SEQ ID NO: 2400 - DNA, 21 bp, synthetic construct
  misc_feature 1..21: note = n-mer motif encoding polynucleotide
  source 1..21: mol_type = other DNA
cctactcaggggacgcctcgg

SEQ ID NO: 2401 - protein, 7 aa, synthetic construct
  REGION 1..7: note = n-mer motif
AGAAIVA

SEQ ID NO: 2402 - DNA, 21 bp, synthetic construct
  misc_feature 1..21: note = n-mer motif encoding polynucleotide
  source 1..21: mol_type = other DNA
gctggtgcggcgattgttgcg

SEQ ID NO: 2403 - protein, 7 aa, synthetic construct
  REGION 1..7: note = n-mer motif
VSASTMA

SEQ ID NO: 2404 - DNA, 21 bp, synthetic construct
  misc_feature 1..21: note = n-mer motif encoding polynucleotide
  source 1..21: mol_type = other DNA
gttagtgcttcgactatggct

SEQ ID NO: 2405 - protein, 7 aa, synthetic construct
  REGION 1..7: note = n-mer motif
SSDSRTL

SEQ ID NO: 2406 - DNA, 21 bp, synthetic construct
  misc_feature 1..21: note = n-mer motif encoding polynucleotide
  source 1..21: mol_type = other DNA
tcgtcggattcgcggacgttg

SEQ ID NO: 2407 - protein, 7 aa, synthetic construct
  REGION 1..7: note = n-mer motif
LTDAHGI

SEQ ID NO: 2408 - DNA, 21 bp, synthetic construct
  misc_feature 1..21: note = n-mer motif encoding polynucleotide
  source 1..21: mol_type = other DNA
ttaacggacgctcacgggatc

SEQ ID NO: 2409 - protein, 7 aa, synthetic construct
  REGION 1..7: note = n-mer motif
TLQGGLS

SEQ ID NO: 2410 - DNA, 21 bp, synthetic construct
  misc_feature 1..21: note = n-mer motif encoding polynucleotide
  source 1..21: mol_type = other DNA
actctgcagggtggtctgtct

SEQ ID NO: 2411 - protein, 7 aa, synthetic construct
  REGION 1..7: note = n-mer motif
SMSSEIW

SEQ ID NO: 2412 - DNA, 21 bp, synthetic construct
  misc_feature 1..21: note = n-mer motif encoding polynucleotide
  source 1..21: mol_type = other DNA
tcgatgtcatccgaaatatgg

SEQ ID NO: 2413 - protein, 7 aa, synthetic construct
  REGION 1..7: note = n-mer motif
QYVDTGG

SEQ ID NO: 2414 - DNA, 21 bp, synthetic construct
  misc_feature 1..21: note = n-mer motif encoding polynucleotide
  source 1..21: mol_type = other DNA
cagtatgttgatactggtggg

SEQ ID NO: 2415 - protein, 7 aa, synthetic construct
  REGION 1..7: note = n-mer motif
VSNTSES

SEQ ID NO: 2416 - DNA, 21 bp, synthetic construct
  misc_feature 1..21: note = n-mer motif encoding polynucleotide
  source 1..21: mol_type = other DNA
gtgtcaaacacctccgaatcg

SEQ ID NO: 2417 - protein, 7 aa, synthetic construct
  REGION 1..7: note = n-mer motif
IGSAGDR

SEQ ID NO: 2418 - DNA, 21 bp, synthetic construct
  misc_feature 1..21: note = n-mer motif encoding polynucleotide
  source 1..21: mol_type = other DNA
attgggagtgcgggtgatcgt

SEQ ID NO: 2419 - protein, 7 aa, synthetic construct
  REGION 1..7: note = n-mer motif
ANEDRMS

SEQ ID NO: 2420 - DNA, 21 bp, synthetic construct
  misc_feature 1..21: note = n-mer motif encoding polynucleotide
  source 1..21: mol_type = other DNA
gctaatgaggatcggatgagt

SEQ ID NO: 2421 - protein, 7 aa, synthetic construct
  REGION 1..7: note = n-mer motif
AAESSVR

SEQ ID NO: 2422 - DNA, 21 bp, synthetic construct
  misc_feature 1..21: note = n-mer motif encoding polynucleotide
  source 1..21: mol_type = other DNA
gcggcggagagttctgtgcgg

SEQ ID NO: 2423 - protein, 7 aa, synthetic construct
  REGION 1..7: note = n-mer motif
SQSDFPN

SEQ ID NO: 2424 - DNA, 21 bp, synthetic construct
  misc_feature 1..21: note = n-mer motif encoding polynucleotide
  source 1..21: mol_type = other DNA
tcacaaagtgacttccccaac

SEQ ID NO: 2425 - protein, 7 aa, synthetic construct
  REGION 1..7: note = n-mer motif
VRGEETV

SEQ ID NO: 2426 - DNA, 21 bp, synthetic construct
  misc_feature 1..21: note = n-mer motif encoding polynucleotide
  source 1..21: mol_type = other DNA
gttcgtggggaagaaaccgtc

SEQ ID NO: 2427 - protein, 7 aa, synthetic construct
  REGION 1..7: note = n-mer motif
NNLGDRM

SEQ ID NO: 2428 - DNA, 21 bp, synthetic construct
  misc_feature 1..21: note = n-mer motif encoding polynucleotide
  source 1..21: mol_type = other DNA
aataatcttggtgatcgtatg

SEQ ID NO: 2429 - protein, 7 aa, synthetic construct
  REGION 1..7: note = n-mer motif
GNLDLKA

SEQ ID NO: 2430 - DNA, 21 bp, synthetic construct
  misc_feature 1..21: note = n-mer motif encoding polynucleotide
  source 1..21: mol_type = other DNA
ggaaaccttgacctcaaagcc

SEQ ID NO: 2431 - protein, 7 aa, synthetic construct
  REGION 1..7: note = n-mer motif
GTKDVSP

SEQ ID NO: 2432 - DNA, 21 bp, synthetic construct
  misc_feature 1..21: note = n-mer motif encoding polynucleotide
  source 1..21: mol_type = other DNA
ggcacaaaagacgtgtcaccc

SEQ ID NO: 2433 - protein, 7 aa, synthetic construct
  REGION 1..7: note = n-mer motif
AIPIAST

SEQ ID NO: 2434 - DNA, 21 bp, synthetic construct
  misc_feature 1..21: note = n-mer motif encoding polynucleotide
  source 1..21: mol_type = other DNA
gctattccgattgcgtctacg

SEQ ID NO: 2435 - protein, 7 aa, synthetic construct
  REGION 1..7: note = n-mer motif
VSASSVD

SEQ ID NO: 2436 - DNA, 21 bp, synthetic construct
  misc_feature 1..21: note = n-mer motif encoding polynucleotide
  source 1..21: mol_type = other DNA
gtatcagcctcgtcggtggac

SEQ ID NO: 2437 - protein, 7 aa, synthetic construct
  REGION 1..7: note = n-mer motif
NMDRDHV

SEQ ID NO: 2438 - DNA, 21 bp, synthetic construct
  misc_feature 1..21: note = n-mer motif encoding polynucleotide
  source 1..21: mol_type = other DNA
aatatggatcgtgatcatgtg

SEQ ID NO: 2439 - protein, 7 aa, synthetic construct
  REGION 1..7: note = n-mer motif
SHASDSK

SEQ ID NO: 2440 - DNA, 21 bp, synthetic construct
  misc_feature 1..21: note = n-mer motif encoding polynucleotide
  source 1..21: mol_type = other DNA
tctcatgcttctgattcgaag

SEQ ID NO: 2441 - protein, 7 aa, synthetic construct
  REGION 1..7: note = n-mer motif
PGSDGGH

SEQ ID NO: 2442 - DNA, 21 bp, synthetic construct
  misc_feature 1..21: note = n-mer motif encoding polynucleotide
  source 1..21: mol_type = other DNA
ccggggtcggatggggggcat

SEQ ID NO: 2443 - protein, 7 aa, synthetic construct
  REGION 1..7: note = n-mer motif
NLGEVQM

SEQ ID NO: 2444 - DNA, 21 bp, synthetic construct
  misc_feature 1..21: note = n-mer motif encoding polynucleotide
  source 1..21: mol_type = other DNA
aatttgggtgaggttcagatg

SEQ ID NO: 2445 - protein, 7 aa, synthetic construct
  REGION 1..7: note = n-mer motif
RYFGDAS

SEQ ID NO: 2446 - DNA, 21 bp, synthetic construct
  misc_feature 1..21: note = n-mer motif encoding polynucleotide
  source 1..21: mol_type = other DNA
cgttacttcggagacgcgagt

SEQ ID NO: 2447 - protein, 7 aa, synthetic construct
  REGION 1..7: note = n-mer motif
AADTTVR

SEQ ID NO: 2448 - DNA, 21 bp, synthetic construct
  misc_feature 1..21: note = n-mer motif encoding polynucleotide
  source 1..21: mol_type = other DNA
gccgctgacacgacagtacgc

SEQ ID NO: 2449 - protein, 7 aa, synthetic construct
  REGION 1..7: note = n-mer motif
VTGVESR

SEQ ID NO: 2450 - DNA, 21 bp, synthetic construct
  misc_feature 1..21: note = n-mer motif encoding polynucleotide
  source 1..21: mol_type = other DNA
gtcacaggagtcgaatctcga

SEQ ID NO: 2451 - protein, 7 aa, synthetic construct
  REGION 1..7: note = n-mer motif
ATVSSPR

SEQ ID NO: 2452 - DNA, 21 bp, synthetic construct
  misc_feature 1..21: note = n-mer motif encoding polynucleotide
  source 1..21: mol_type = other DNA
gcgaccgtatcaagccctagg

SEQ ID NO: 2453 - protein, 7 aa, synthetic construct
  REGION 1..7: note = n-mer motif
GGNAGLN

SEQ ID NO: 2454 - DNA, 21 bp, synthetic construct
  misc_feature 1..21: note = n-mer motif encoding polynucleotide
  source 1..21: mol_type = other DNA
ggtggtaatgcggggcttaat

SEQ ID NO: 2455 - protein, 7 aa, synthetic construct
  REGION 1..7: note = n-mer motif
RNQSDQM

SEQ ID NO: 2456 - DNA, 21 bp, synthetic construct
  misc_feature 1..21: note = n-mer motif encoding polynucleotide
  source 1..21: mol_type = other DNA
cggaaccaatcggaccaaatg

SEQ ID NO: 2457 - protein, 7 aa, synthetic construct
  REGION 1..7: note = n-mer motif
RHQGTES

SEQ ID NO: 2458 - DNA, 21 bp, synthetic construct
  misc_feature 1..21: note = n-mer motif encoding polynucleotide
  source 1..21: mol_type = other DNA
aggcaccaaggaacagaatcg

SEQ ID NO: 2459 - protein, 7 aa, synthetic construct
  REGION 1..7: note = n-mer motif
TTSIPTP

SEQ ID NO: 2460 - DNA, 21 bp, synthetic construct
  misc_feature 1..21: note = n-mer motif encoding polynucleotide
  source 1..21: mol_type = other DNA
acgacgtctattccgacgcct

SEQ ID NO: 2461 - protein, 7 aa, synthetic construct
  REGION 1..7: note = n-mer motif
TSHLGQS

SEQ ID NO: 2462 - DNA, 21 bp, synthetic construct
  misc_feature 1..21: note = n-mer motif encoding polynucleotide
  source 1..21: mol_type = other DNA
acgtcacaccttgggcaaagt

SEQ ID NO: 2463 - protein, 7 aa, synthetic construct
  REGION 1..7: note = n-mer motif
GVNPAVS

SEQ ID NO: 2464 - DNA, 21 bp, synthetic construct
  misc_feature 1..21: note = n-mer motif encoding polynucleotide
  source 1..21: mol_type = other DNA
ggtgttaatcctgcggtgtct

SEQ ID NO: 2465 - protein, 7 aa, synthetic construct
  REGION 1..7: note = n-mer motif
GSDTTVG

SEQ ID NO: 2466 - DNA, 21 bp, synthetic construct
  misc_feature 1..21: note = n-mer motif encoding polynucleotide
  source 1..21: mol_type = other DNA
ggttcggatacgacggttggt

SEQ ID NO: 2467 - protein, 7 aa, synthetic construct
  REGION 1..7: note = n-mer motif
DLAQSGR

SEQ ID NO: 2468 - DNA, 21 bp, synthetic construct
  misc_feature 1..21: note = n-mer motif encoding polynucleotide
  source 1..21: mol_type = other DNA
gatttggctcagagtgggcgt

SEQ ID NO: 2469 - protein, 7 aa, synthetic construct
  REGION 1..7: note = n-mer motif
GMNEHVA

SEQ ID NO: 2470 - DNA, 21 bp, synthetic construct
  misc_feature 1..21: note = n-mer motif encoding polynucleotide
  source 1..21: mol_type = other DNA
gggatgaacgaacacgtcgcc

SEQ ID NO: 2471 - protein, 7 aa, synthetic construct
  REGION 1..7: note = n-mer motif
VMDHKST

SEQ ID NO: 2472 - DNA, 21 bp, synthetic construct
  misc_feature 1..21: note = n-mer motif encoding polynucleotide
  source 1..21: mol_type = other DNA
gttatggatcataagagtacg

SEQ ID NO: 2473 - protein, 7 aa, synthetic construct
  REGION 1..7: note = n-mer motif
MSTDTPA

SEQ ID NO: 2474 - DNA, 21 bp, synthetic construct
  misc_feature 1..21: note = n-mer motif encoding polynucleotide
  source 1..21: mol_type = other DNA
atgtcgacagacacgcccgcg

SEQ ID NO: 2475 - protein, 7 aa, synthetic construct
  REGION 1..7: note = n-mer motif
AMTVEMP

SEQ ID NO: 2476 - DNA, 21 bp, synthetic construct
  misc_feature 1..21: note = n-mer motif encoding polynucleotide
  source 1..21: mol_type = other DNA
gctatgacggttgagatgcct

SEQ ID NO: 2477 - protein, 7 aa, synthetic construct
  REGION 1..7: note = n-mer motif
GSRENER

SEQ ID NO: 2478 - DNA, 21 bp, synthetic construct
  misc_feature 1..21: note = n-mer motif encoding polynucleotide
  source 1..21: mol_type = other DNA
ggcagccgcgaaaacgaacga

SEQ ID NO: 2479 - protein, 7 aa, synthetic construct
  REGION 1..7: note = n-mer motif
ATDSQGL

SEQ ID NO: 2480 - DNA, 21 bp, synthetic construct
  misc_feature 1..21: note = n-mer motif encoding polynucleotide
  source 1..21: mol_type = other DNA
gctacggattcgcaggggctg

SEQ ID NO: 2481 - protein, 7 aa, synthetic construct
  REGION 1..7: note = n-mer motif
PNERITV

SEQ ID NO: 2482 - DNA, 21 bp, synthetic construct
  misc_feature 1..21: note = n-mer motif encoding polynucleotide
  source 1..21: mol_type = other DNA
ccgaatgagaggattactgtg

SEQ ID NO: 2483 - protein, 7 aa, synthetic construct
  REGION 1..7: note = n-mer motif
TTLSDTA

SEQ ID NO: 2484 - DNA, 21 bp, synthetic construct
  misc_feature 1..21: note = n-mer motif encoding polynucleotide
  source 1..21: mol_type = other DNA
actactctgtctgatactgcg

SEQ ID NO: 2485 - protein, 7 aa, synthetic construct
  REGION 1..7: note = n-mer motif
HSTGAEM

SEQ ID NO: 2486 - DNA, 21 bp, synthetic construct
  misc_feature 1..21: note = n-mer motif encoding polynucleotide
  source 1..21: mol_type = other DNA
cactcaacaggcgccgaaatg

SEQ ID NO: 2487 - protein, 7 aa, synthetic construct
  REGION 1..7: note = n-mer motif
AVLAAAH

SEQ ID NO: 2488 - DNA, 21 bp, synthetic construct
  misc_feature 1..21: note = n-mer motif encoding polynucleotide
  source 1..21: mol_type = other DNA
gcggtgttggctgcggctcat

SEQ ID NO: 2489 - protein, 7 aa, synthetic construct
  REGION 1..7: note = n-mer motif
STLHSST

SEQ ID NO: 2490 - DNA, 21 bp, synthetic construct
  misc_feature 1..21: note = n-mer motif
  source 1..21: mol_type = other DNA
tctacattgcactcgagcacc

SEQ ID NO: 2491 - protein, 7 aa, synthetic construct
  REGION 1..7: note = n-mer motif
VLSVGVV

SEQ ID NO: 2492 - DNA, 21 bp, synthetic construct
  misc_feature 1..21: note = n-mer motif encoding polynucleotide
  source 1..21: mol_type = other DNA
gtgctgagtgtgggggttgtt

SEQ ID NO: 2493 - protein, 7 aa, synthetic construct
  REGION 1..7: note = n-mer motif
KEGIATA

SEQ ID NO: 2494 - DNA, 21 bp, synthetic construct
  misc_feature 1..21: note = n-mer motif encoding polynucleotide
  source 1..21: mol_type = other DNA
aaagaaggtatcgctaccgca

SEQ ID NO: 2495 - protein, 7 aa, synthetic construct
  REGION 1..7: note = n-mer motif
MVNHTNT

SEQ ID NO: 2496 - DNA, 21 bp, synthetic construct
  misc_feature 1..21: note = n-mer motif encoding polynucleotide
  source 1..21: mol_type = other DNA
atggtgaaccacactaacact

SEQ ID NO: 2497 - protein, 7 aa, synthetic construct
  REGION 1..7: note = n-mer motif
ESTATLR

SEQ ID NO: 2498 - DNA, 21 bp, synthetic construct
  misc_feature 1..21: note = n-mer motif encoding polynucleotide
  source 1..21: mol_type = other DNA
gagtctactgctactcttcgg

SEQ ID NO: 2499 - protein, 7 aa, synthetic construct
  REGION 1..7: note = n-mer motif
AVKEHES

SEQ ID NO: 2500 - DNA, 21 bp, synthetic construct
  misc_feature 1..21: note = n-mer motif encoding polynucleotide
  source 1..21: mol_type = other DNA
gccgtcaaagaacacgaatcc

SEQ ID NO: 2501 - protein, 7 aa, synthetic construct
  REGION 1..7: note = n-mer motif
RYFGDAS

SEQ ID NO: 2502 - DNA, 21 bp, synthetic construct
  misc_feature 1..21: note = n-mer motif encoding polynucleotide
  source 1..21: mol_type = other DNA
cggtattttggggatgcttcg

SEQ ID NO: 2503 - protein, 7 aa, synthetic construct
  REGION 1..7: note = n-mer motif
LDARGDR

SEQ ID NO: 2504 - DNA, 21 bp, synthetic construct
  misc_feature 1..21: note = n-mer motif encoding polynucleotide
  source 1..21: mol_type = other DNA
ctggacgccaggggagaccgt

SEQ ID NO: 2505 - protein, 7 aa, synthetic construct
  REGION 1..7: note = n-mer motif
PLNKDTR

SEQ ID NO: 2506 - DNA, 21 bp, synthetic construct
  misc_feature 1..21: note = n-mer motif encoding polynucleotide
  source 1..21: mol_type = other DNA
ccattgaacaaagacactcgg

SEQ ID NO: 2507 - protein, 7 aa, synthetic construct
  REGION 1..7: note = n-mer motif
FQVDKVM

SEQ ID NO: 2508 - DNA, 21 bp, synthetic construct
  misc_feature 1..21: note = n-mer motif encoding polynucleotide
  source 1..21: mol_type = other DNA
tttcaggttgataaggttatg

SEQ ID NO: 2509 - protein, 7 aa, synthetic construct
  REGION 1..7: note = n-mer motif
LTDKITS

SEQ ID NO: 2510 - DNA, 21 bp, synthetic construct
  misc_feature 1..21: note = n-mer motif encoding polynucleotide
  source 1..21: mol_type = other DNA
ctgacagacaaaatcactagt

SEQ ID NO: 2511 - protein, 7 aa, synthetic construct
  REGION 1..7: note = n-mer motif
LKPAIEL

SEQ ID NO: 2512 - DNA, 21 bp, synthetic construct
  misc_feature 1..21: note = n-mer motif encoding polynucleotide
  source 1..21: mol_type = other DNA
cttaagcctgcgattgagctg

SEQ ID NO: 2513 - protein, 7 aa, synthetic construct
  REGION 1..7: note = n-mer motif
ADSVYAK

SEQ ID NO: 2514 - DNA, 21 bp, synthetic construct
  misc_feature 1..21: note = n-mer motif encoding polynucleotide
  source 1..21: mol_type = other DNA
gctgatagtgtttatgctaag

SEQ ID NO: 2515 - protein, 7 aa, synthetic construct
  REGION 1..7: note = n-mer motif
VMSSPGP

SEQ ID NO: 2516 - DNA, 21 bp, synthetic construct
  misc_feature 1..21: note = n-mer motif encoding polynucleotide
  source 1..21: mol_type = other DNA
gttatgtcttcgcctggtcct

SEQ ID NO: 2517 - protein, 7 aa, synthetic construct
  REGION 1..7: note = n-mer motif
ALAISER

SEQ ID NO: 2518 - DNA, 21 bp, synthetic construct
  misc_feature 1..21: note = n-mer motif encoding polynucleotide
  source 1..21: mol_type = other DNA
gccctagctatcagtgaacgt

SEQ ID NO: 2519 - protein, 7 aa, synthetic construct
  REGION 1..7: note = n-mer motif
VTKEHLA

SEQ ID NO: 2520 - DNA, 21 bp, synthetic construct
  misc_feature 1..21: note = n-mer motif encoding polynucleotide
  source 1..21: mol_type = other DNA
gttactaaagaacacctcgcc

SEQ ID NO: 2521 - protein, 7 aa, synthetic construct
  REGION 1..7: note = n-mer motif
GLTNTNI

SEQ ID NO: 2522 - DNA, 21 bp, synthetic construct
  misc_feature 1..21: note = n-mer motif encoding polynucleotide
  source 1..21: mol_type = other DNA
ggacttacaaacacgaacata

SEQ ID NO: 2523 - protein, 7 aa, synthetic construct
  REGION 1..7: note = n-mer motif
KQVSMES

SEQ ID NO: 2524 - DNA, 21 bp, synthetic construct
  misc_feature 1..21: note = n-mer motif encoding polynucleotide
  source 1..21: mol_type = other DNA
aagcaggtgtcgatggagtcg

SEQ ID NO: 2525 - protein, 7 aa, synthetic construct
  REGION 1..7: note = n-mer motif
SPSASPN

SEQ ID NO: 2526 - DNA, 21 bp, synthetic construct
  misc_feature 1..21: note = n-mer motif encoding polynucleotide
  source 1..21: mol_type = other DNA
agtccgtcggcttctcctaat

SEQ ID NO: 2527 - protein, 7 aa, synthetic construct
  REGION 1..7: note = n-mer motif
VVVGNVK

SEQ ID NO: 2528 - DNA, 21 bp, synthetic construct
  misc_feature 1..21: note = n-mer motif encoding polynucleotide
  source 1..21: mol_type = other DNA
gtcgtagtgggcaacgttaaa

SEQ ID NO: 2529 - protein, 7 aa, synthetic construct
  REGION 1..7: note = n-mer motif
SHGSDTK

SEQ ID NO: 2530 - DNA, 21 bp, synthetic construct
  misc_feature 1..21: note = n-mer motif encoding polynucleotide
  source 1..21: mol_type = other DNA
tcccacggaagtgacaccaaa

SEQ ID NO: 2531 - protein, 7 aa, synthetic construct
  REGION 1..7: note = n-mer motif
QSREIKI

SEQ ID NO: 2532 - DNA, 21 bp, synthetic construct
  misc_feature 1..21: note = n-mer motif encoding polynucleotide
  source 1..21: mol_type = other DNA
cagagtagggagattaagatt

SEQ ID NO: 2533 - protein, 7 aa, synthetic construct
  REGION 1..7: note = n-mer motif
PALQGNI

SEQ ID NO: 2534 - DNA, 21 bp, synthetic construct
  misc_feature 1..21: note = n-mer motif encoding polynucleotide
  source 1..21: mol_type = other DNA
ccggctcttcagggtaatatt

SEQ ID NO: 2535 - protein, 7 aa, synthetic construct
  REGION 1..7: note = n-mer motif
TLVGVER

SEQ ID NO: 2536 - DNA, 21 bp, synthetic construct
  misc_feature 1..21: note = n-mer motif encoding polynucleotide
  source 1..21: mol_type = other DNA
acactcgtgggcgtcgaaagg

SEQ ID NO: 2537 - protein, 7 aa, synthetic construct
  REGION 1..7: note = n-mer motif
SGGTMTL

SEQ ID NO: 2538 - DNA, 21 bp, synthetic construct
  misc_feature 1..21: note = n-mer motif encoding polynucleotide
  source 1..21: mol_type = other DNA
agtgggggtacgatgacgctg

SEQ ID NO: 2539 - protein, 7 aa, synthetic construct
  REGION 1..7: note = n-mer motif
DRRTDDS

SEQ ID NO: 2540 - DNA, 21 bp, synthetic construct
  misc_feature 1..21: note = n-mer motif encoding polynucleotide
  source 1..21: mol_type = other DNA
gatcgtcgtactgatgattct

SEQ ID NO: 2541 - protein, 7 aa, synthetic construct
  REGION 1..7: note = n-mer motif
NSDNTRL

SEQ ID NO: 2542 - DNA, 21 bp, synthetic construct
  misc_feature 1..21: note = n-mer motif encoding polynucleotide
  source 1..21: mol_type = other DNA
aattcggataatactaggctg

SEQ ID NO: 2543 - protein, 7 aa, synthetic construct
  REGION 1..7: note = n-mer motif
ALQSAQV

SEQ ID NO: 2544 - DNA, 21 bp, synthetic construct
  misc_feature 1..21: note = n-mer motif encoding polynucleotide
  source 1..21: mol_type = other DNA
gcactacaatctgcacaagtt

SEQ ID NO: 2545 - protein, 7 aa, synthetic construct
  REGION 1..7: note = n-mer motif
NVNPDSL

SEQ ID NO: 2546 - DNA, 21 bp, synthetic construct
  misc_feature 1..21: note = n-mer motif encoding polynucleotide
  source 1..21: mol_type = other DNA
aacgtaaaccccgacagctta

SEQ ID NO: 2547 - protein, 7 aa, synthetic construct
  REGION 1..7: note = n-mer motif
SNGLPAK

SEQ ID NO: 2548 - DNA, 21 bp, synthetic construct
  misc_feature 1..21: note = n-mer motif encoding polynucleotide
  source 1..21: mol_type = other DNA
agtaatgggcttcctgcgaag

SEQ ID NO: 2549 - protein, 7 aa, synthetic construct
  REGION 1..7: note = n-mer motif
GLNEHVV

SEQ ID NO: 2550 - DNA, 21 bp, synthetic construct
  misc_feature 1..21: note = n-mer motif encoding polynucleotide
  source 1..21: mol_type = other DNA
gggctaaacgaacacgtcgta

SEQ ID NO: 2551 - protein, 7 aa, synthetic construct
  REGION 1..7: note = n-mer motif
LVTVHTA

SEQ ID NO: 2552 - DNA, 21 bp, synthetic construct
  misc_feature 1..21: note = n-mer motif encoding polynucleotide
  source 1..21: mol_type = other DNA
ctagtcaccgtacacacggca

SEQ ID NO: 2553 - protein, 7 aa, synthetic construct
  REGION 1..7: note = n-mer motif
GVAATNS

SEQ ID NO: 2554 - DNA, 21 bp, synthetic construct
  misc_feature 1..21: note = n-mer motif encoding polynucleotide
  source 1..21: mol_type = other DNA
ggcgtagcggcaaccaacagc

SEQ ID NO: 2555 - protein, 7 aa, synthetic construct
  REGION 1..7: note = n-mer motif
QVTDNKT

SEQ ID NO: 2556 - DNA, 21 bp, synthetic construct
  misc_feature 1..21: note = n-mer motif encoding polynucleotide
  source 1..21: mol_type = other DNA
caagtaacagacaacaaaacg

SEQ ID NO: 2557 - protein, 7 aa, synthetic construct
  REGION 1..7: note = n-mer motif
VNGVSTI

SEQ ID NO: 2558 - DNA, 21 bp, synthetic construct
  misc_feature 1..21: note = n-mer motif encoding polynucleotide
  source 1..21: mol_type = other DNA
gttaacggagtatccacaatc

SEQ ID NO: 2559 - protein, 7 aa, synthetic construct
  REGION 1..7: note = n-mer motif
PIASSYE

SEQ ID NO: 2560 - DNA, 21 bp, synthetic construct
  misc_feature 1..21: note = n-mer motif encoding polynucleotide
  source 1..21: mol_type = other DNA
cctattgcgtctagttatgag

SEQ ID NO: 2561 - protein, 7 aa, synthetic construct
  REGION 1..7: note = n-mer motif
LGESLSR

SEQ ID NO: 2562 - DNA, 21 bp, synthetic construct
  misc_feature 1..21: note = n-mer motif encoding polynucleotide
  source 1..21: mol_type = other DNA
ttgggtgagtctttgagtcgg

SEQ ID NO: 2563 - protein, 7 aa, synthetic construct
  REGION 1..7: note = n-mer motif
PALAGNF

SEQ ID NO: 2564 - DNA, 21 bp, synthetic construct
  misc_feature 1..21: note = n-mer motif encoding polynucleotide
  source 1..21: mol_type = other DNA
ccggctcttgcgggtaatttt

SEQ ID NO: 2565 - protein, 7 aa, synthetic construct
  REGION 1..7: note = n-mer motif
RRDASDP

SEQ ID NO: 2566 - DNA, 21 bp, synthetic construct
  misc_feature 1..21: note = n-mer motif encoding polynucleotide
  source 1..21: mol_type = other DNA
cggcgagacgcctccgacccc

SEQ ID NO: 2567 - protein, 7 aa, synthetic construct
  REGION 1..7: note = n-mer motif
WDNFRFA

SEQ ID NO: 2568 - DNA, 21 bp, synthetic construct
  misc_feature 1..21: note = n-mer motif encoding polynucleotide
  source 1..21: mol_type = other DNA
tgggacaacttcagattcgcg

SEQ ID NO: 2569 - protein, 7 aa, synthetic construct
  REGION 1..7: note = n-mer motif
VIGGVLS

SEQ ID NO: 2570 - DNA, 21 bp, synthetic construct
  misc_feature 1..21: note = n-mer motif encoding polynucleotide
  source 1..21: mol_type = other DNA
gtgattggtggtgtgttgagt

SEQ ID NO: 2571 - protein, 7 aa, synthetic construct
  REGION 1..7: note = n-mer motif
ADDNNRW

SEQ ID NO: 2572 - DNA, 21 bp, synthetic construct
  misc_feature 1..21: note = n-mer motif encoding polynucleotide
  source 1..21: mol_type = other DNA
gctgatgataataataggtgg

SEQ ID NO: 2573 - protein, 7 aa, synthetic construct
  REGION 1..7: note = n-mer motif
LTHSTAV

SEQ ID NO: 2574 - DNA, 21 bp, synthetic construct
  misc_feature 1..21: note = n-mer motif encoding polynucleotide
  source 1..21: mol_type = other DNA
cttacccacagtacagcggtg

SEQ ID NO: 2575 - protein, 7 aa, synthetic construct
  REGION 1..7: note = n-mer motif
VLSGEVL

SEQ ID NO: 2576 - DNA, 21 bp, synthetic construct
  misc_feature 1..21: note = n-mer motif encoding polynucleotide
  source 1..21: mol_type = other DNA
gtcttgtctggagaagtcctt

SEQ ID NO: 2577 - protein, 7 aa, synthetic construct
  REGION 1..7: note = n-mer motif
SVVADKH

SEQ ID NO: 2578 - DNA, 21 bp, synthetic construct
  misc_feature 1..21: note = n-mer motif encoding polynucleotide
  source 1..21: mol_type = other DNA
agtgttgtggcggacaaacac

SEQ ID NO: 2579 - protein, 7 aa, synthetic construct
  REGION 1..7: note = n-mer motif
PGSTDPK

SEQ ID NO: 2580 - DNA, 21 bp, synthetic construct
  misc_feature 1..21: note = n-mer motif encoding polynucleotide
  source 1..21: mol_type = other DNA
cctgggagtactgatccgaag

SEQ ID NO: 2581 - protein, 7 aa, synthetic construct
  REGION 1..7: note = n-mer motif
ASAELGR

SEQ ID NO: 2582 - DNA, 21 bp, synthetic construct
  misc_feature 1..21: note = n-mer motif encoding polynucleotide
  source 1..21: mol_type = other DNA
gcgagtgcggagctgggtcgt

SEQ ID NO: 2583 - protein, 7 aa, synthetic construct
  REGION 1..7: note = n-mer motif
REQQKLW

SEQ ID NO: 2584 - DNA, 21 bp, synthetic construct
  misc_feature 1..21: note = n-mer motif encoding polynucleotide
  source 1..21: mol_type = other DNA
cgtgagcagcagaagctttgg

SEQ ID NO: 2585 - protein, 7 aa, synthetic construct
  REGION 1..7: note = n-mer motif
REQQKLW

SEQ ID NO: 2586 - DNA, 21 bp, synthetic construct
  misc_feature 1..21: note = n-mer motif encoding polynucleotide
  source 1..21: mol_type = other DNA
cgggaacaacaaaaattatgg

SEQ ID NO: 2587 - protein, 7 aa, synthetic construct
  REGION 1..7: note = n-mer motif
ASNPGRW

SEQ ID NO: 2588 - DNA, 21 bp, synthetic construct
  misc_feature 1..21: note = n-mer motif encoding polynucleotide
  source 1..21: mol_type = other DNA
gcttcgaatccgggtcggtgg

SEQ ID NO: 2589 - protein, 7 aa, synthetic construct
  REGION 1..7: note = n-mer motif
SLDKPFK

SEQ ID NO: 2590 - DNA, 21 bp, synthetic construct
  misc_feature 1..21: note = n-mer motif encoding polynucleotide
  source 1..21: mol_type = other DNA
agtttggataagccttttaag

SEQ ID NO: 2591 - protein, 7 aa, synthetic construct
  REGION 1..7: note = n-mer motif
TLAVPFK

SEQ ID NO: 2592 - DNA, 21 bp, synthetic construct
  misc_feature 1..21: note = n-mer motif encoding polynucleotide
  source 1..21: mol_type = other DNA
actttggcggtgccttttaag

SEQ ID NO: 2593 - protein, 7 aa, synthetic construct
  REGION 1..7: note = n-mer motif
TLAVPFK

SEQ ID NO: 2594 - DNA, 21 bp, synthetic construct
  misc_feature 1..21: note = n-mer motif encoding polynucleotide
  source 1..21: mol_type = other DNA
accttagctgtcccgttcaaa

SEQ ID NO: 2595 - protein, 7 aa, synthetic construct
  REGION 1..7: note = n-mer motif
SLDKPFK

SEQ ID NO: 2596 - DNA, 21 bp, synthetic construct
  misc_feature 1..21: note = n-mer motif encoding polynucleotide
  source 1..21: mol_type = other DNA
tcactggacaaaccattcaaa

SEQ ID NO: 2597 - protein, 7 aa, synthetic construct
  REGION 1..7: note = n-mer motif
WTLESGH

SEQ ID NO: 2598 - DNA, 21 bp, synthetic construct
  misc_feature 1..21: note = n-mer motif encoding polynucleotide
  source 1..21: mol_type = other DNA
tggactctggagtctggtcat

SEQ ID NO: 2599 - protein, 7 aa, synthetic construct
  REGION 1..7: note = n-mer motif
ASNPGRW

SEQ ID NO: 2600 - DNA, 21 bp, synthetic construct
  misc_feature 1..21: note = n-mer motif encoding polynucleotide
  source 1..21: mol_type = other DNA
gcaagcaaccctggaagatgg

SEQ ID NO: 2601 - protein, 7 aa, synthetic construct
  REGION 1..7: note = n-mer motif
REQKKLW

SEQ ID NO: 2602 - DNA, 21 bp, synthetic construct
  misc_feature 1..21: note = n-mer motif encoding polynucleotide
  source 1..21: mol_type = other DNA
cgtgagcagaagaagctttgg

SEQ ID NO: 2603 - protein, 7 aa, synthetic construct
  REGION 1..7: note = n-mer motif
WTLESGH

SEQ ID NO: 2604 - DNA, 21 bp, synthetic construct
  misc_feature 1..21: note = n-mer motif encoding polynucleotide
  source 1..21: mol_type = other DNA
tggacgctcgaatcgggccac

SEQ ID NO: 2605 - protein, 7 aa, synthetic construct
  REGION 1..7: note = n-mer motif
REQKKLW

SEQ ID NO: 2606 - DNA, 21 bp, synthetic construct
  misc_feature 1..21: note = n-mer motif encoding polynucleotide
  source 1..21: mol_type = other DNA
cgggaacaaaaaaaactgtgg

SEQ ID NO: 2607 - protein, 7 aa, synthetic construct
  REGION 1..7: note = n-mer motif
ERLLVQL

SEQ ID NO: 2608 - DNA, 21 bp, synthetic construct
  misc_feature 1..21: note = n-mer motif encoding polynucleotide
  source 1..21: mol_type = other DNA
gagcggctgcttgttcagctg

SEQ ID NO: 2609 - protein, 7 aa, synthetic construct
  REGION 1..7: note = n-mer motif
RMQRTLY

SEQ ID NO: 2610 - DNA, 21 bp, synthetic construct
  misc_feature 1..21: note = n-mer motif encoding polynucleotide
  source 1..21: mol_type = other DNA
cgtatgcagcggactctgtat

SEQ ID NO: 2611 - protein, 7 aa, synthetic construct
  REGION 1..7: note = n-mer motif
ERLLVQL

SEQ ID NO: 2612 - DNA, 21 bp, synthetic construct
  misc_feature 1..21: note = n-mer motif encoding polynucleotide
  source 1..21: mol_type = other DNA
gaacgacttctagtccaacta

SEQ ID NO: 2613 - protein, 7 aa, synthetic construct
  REGION 1..7: note = n-mer motif
LGFSPPR

SEQ ID NO: 2614 - DNA, 21 bp, synthetic construct
  misc_feature 1..21: note = n-mer motif encoding polynucleotide
  source 1..21: mol_type = other DNA
cttggattctcacctccccgt

SEQ ID NO: 2615 - protein, 7 aa, synthetic construct
  REGION 1..7: note = n-mer motif
WAISDGY

SEQ ID NO: 2616 - DNA, 21 bp, synthetic construct
  misc_feature 1..21: note = n-mer motif encoding polynucleotide
  source 1..21: mol_type = other DNA
tgggcgattagtgatgggtat

SEQ ID NO: 2617 - protein, 7 aa, synthetic construct
  REGION 1..7: note = n-mer motif
TEKLPFR

SEQ ID NO: 2618 - DNA, 21 bp, synthetic construct
  misc_feature 1..21: note = n-mer motif encoding polynucleotide
  source 1..21: mol_type = other DNA
actgagaagctgccttttcgg

SEQ ID NO: 2619 - protein, 7 aa, synthetic construct
  REGION 1..7: note = n-mer motif
VRGSSIL

SEQ ID NO: 2620 - DNA, 21 bp, synthetic construct
  misc_feature 1..21: note = n-mer motif encoding polynucleotide
  source 1..21: mol_type = other DNA
gtgcgtgggtcgtcgattctt

SEQ ID NO: 2621 - protein, 7 aa, synthetic construct
  REGION 1..7: note = n-mer motif
KLADSVP

SEQ ID NO: 2622 - DNA, 21 bp, synthetic construct
  misc_feature 1..21: note = n-mer motif encoding polynucleotide
  source 1..21: mol_type = other DNA
aaacttgcagactcagtgccc

SEQ ID NO: 2623 - protein, 7 aa, synthetic construct
  REGION 1..7: note = n-mer motif
VRGSSIL

SEQ ID NO: 2624 - DNA, 21 bp, synthetic construct
  misc_feature 1..21: note = n-mer motif encoding polynucleotide
  source 1..21: mol_type = other DNA
gtccggggatccagtatcctg

SEQ ID NO: 2625 - protein, 7 aa, synthetic construct
  REGION 1..7: note = n-mer motif
RQQQKLW

SEQ ID NO: 2626 - DNA, 21 bp, synthetic construct
  misc_feature 1..21: note = n-mer motif encoding polynucleotide
  source 1..21: mol_type = other DNA
aggcaacaacaaaaattatgg

SEQ ID NO: 2627 - protein, 7 aa, synthetic construct
  REGION 1..7: note = n-mer motif
TVNNDRF

SEQ ID NO: 2628 - DNA, 21 bp, synthetic construct
  misc_feature 1..21: note = n-mer motif encoding polynucleotide
  source 1..21: mol_type = other DNA
accgttaacaacgaccgattc

SEQ ID NO: 2629 - protein, 7 aa, synthetic construct
  REGION 1..7: note = n-mer motif
TVSENAV

SEQ ID NO: 2630 - DNA, 21 bp, synthetic construct
  misc_feature 1..21: note = n-mer motif encoding polynucleotide
  source 1..21: mol_type = other DNA
acggttagtgagaatgcggtt

SEQ ID NO: 2631 - protein, 7 aa, synthetic construct
  REGION 1..7: note = n-mer motif
MSANERT

SEQ ID NO: 2632 - DNA, 21 bp, synthetic construct
  misc_feature 1..21: note = n-mer motif encoding polynucleotide
  source 1..21: mol_type = other DNA
atgtcggcgaatgagcgtacg

SEQ ID NO: 2633 - protein, 7 aa, synthetic construct
  REGION 1..7: note = n-mer motif
RDQQKLW

SEQ ID NO: 2634 - DNA, 21 bp, synthetic construct
  misc_feature 1..21: note = n-mer motif encoding polynucleotide
  source 1..21: mol_type = other DNA
cgtgatcagcagaagctttgg

SEQ ID NO: 2635 - protein, 7 aa, synthetic construct
  REGION 1..7: note = n-mer motif
GASNGGT

SEQ ID NO: 2636 - DNA, 21 bp, synthetic construct
  misc_feature 1..21: note = n-mer motif encoding polynucleotide
  source 1..21: mol_type = other DNA
ggggcgagtaatggtgggact

SEQ ID NO: 2637 - protein, 7 aa, synthetic construct
  REGION 1..7: note = n-mer motif
TEKLPFR

SEQ ID NO: 2638 - DNA, 21 bp, synthetic construct
  misc_feature 1..21: note = n-mer motif encoding polynucleotide
  source 1..21: mol_type = other DNA
acagaaaaactccccttcaga

SEQ ID NO: 2639 - protein, 7 aa, synthetic construct
  REGION 1..7: note = n-mer motif
ASTATLW

SEQ ID NO: 2640 - DNA, 21 bp, synthetic construct
  misc_feature 1..21: note = n-mer motif encoding polynucleotide
  source 1..21: mol_type = other DNA
gcctcaacggccaccttatgg

SEQ ID NO: 2641 - protein, 7 aa, synthetic construct
  REGION 1..7: note = n-mer motif
VTELTKF

SEQ ID NO: 2642 - DNA, 21 bp, synthetic construct
  misc_feature 1..21: note = n-mer motif encoding polynucleotide
  source 1..21: mol_type = other DNA
gtgactgagcttacgaagttt

SEQ ID NO: 2643 - protein, 7 aa, synthetic construct
  REGION 1..7: note = n-mer motif
KEISVSV

SEQ ID NO: 2644 - DNA, 21 bp, synthetic construct
  misc_feature 1..21: note = n-mer motif encoding polynucleotide
  source 1..21: mol_type = other DNA
aaggagattagtgtgtcggtt

SEQ ID NO: 2645 - protein, 7 aa, synthetic construct
  REGION 1..7: note = n-mer motif
QVAQQGA

SEQ ID NO: 2646 - DNA, 21 bp, synthetic construct
  misc_feature 1..21: note = n-mer motif encoding polynucleotide
  source 1..21: mol_type = other DNA
caggttgcgcagcagggggcg

SEQ ID NO: 2647 - protein, 7 aa, synthetic construct
  REGION 1..7: note = n-mer motif
GVAGTNT

SEQ ID NO: 2648 - DNA, 21 bp, synthetic construct
  misc_feature 1..21: note = n-mer motif encoding polynucleotide
  source 1..21: mol_type = other DNA
ggggtggctgggacgaatact

SEQ ID NO: 2649 - protein, 7 aa, synthetic construct
  REGION 1..7: note = n-mer motif
ASAQGAL

SEQ ID NO: 2650 - DNA, 21 bp, synthetic construct
  misc_feature 1..21: note = n-mer motif encoding polynucleotide
  source 1..21: mol_type = other DNA
gcgtctgctcagggtgcgctt

SEQ ID NO: 2651 - protein, 7 aa, synthetic construct
  REGION 1..7: note = n-mer motif
QSVDRSK

SEQ ID NO: 2652 - DNA, 21 bp, synthetic construct
  misc_feature 1..21: note = n-mer motif encoding polynucleotide
  source 1..21: mol_type = other DNA
cagtcggtggatcgtagtaag

SEQ ID NO: 2653 - protein, 7 aa, synthetic construct
  REGION 1..7: note = n-mer motif
RYVGESS

SEQ ID NO: 2654 - DNA, 21 bp, synthetic construct
  misc_feature 1..21: note = n-mer motif encoding polynucleotide
  source 1..21: mol_type = other DNA
cggtacgtcggagaaagcagt

SEQ ID NO: 2655 - protein, 7 aa, synthetic construct
  REGION 1..7: note = n-mer motif
LGHNAGV

SEQ ID NO: 2656 - DNA, 21 bp, synthetic construct
  misc_feature 1..21: note = n-mer motif encoding polynucleotide
  source 1..21: mol_type = other DNA
ttggggcataatgctggtgtt

SEQ ID NO: 2657 - protein, 7 aa, synthetic construct
  REGION 1..7: note = n-mer motif
RAAGTSA

SEQ ID NO: 2658 - DNA, 21 bp, synthetic construct
  misc_feature 1..21: note = n-mer motif encoding polynucleotide
  source 1..21: mol_type = other DNA
cgcgccgctggcacctcagca

SEQ ID NO: 2659 - protein, 7 aa, synthetic construct
  REGION 1..7: note = n-mer motif
VGISSGV

SEQ ID NO: 2660 - DNA, 21 bp, synthetic construct
  misc_feature 1..21: note = n-mer motif encoding polynucleotide
  source 1..21: mol_type = other DNA
gttggtatttcttcgggtgtg

SEQ ID NO: 2661 - protein, 7 aa, synthetic construct
  REGION 1..7: note = n-mer motif
VLVSPGP

SEQ ID NO: 2662 - DNA, 21 bp, synthetic construct
  misc_feature 1..21: note = n-mer motif encoding polynucleotide
  source 1..21: mol_type = other DNA
gttctggtttcgcctggtcct

SEQ ID NO: 2663 - protein, 7 aa, synthetic construct
  REGION 1..7: note = n-mer motif
SGETLRI

SEQ ID NO: 2664 - DNA, 21 bp, synthetic construct
  misc_feature 1..21: note = n-mer motif encoding polynucleotide
  source 1..21: mol_type = other DNA
tctggggagacgcttaggatt

SEQ ID NO: 2665 - protein, 7 aa, synthetic construct
  REGION 1..7: note = n-mer motif
STEGAAL

SEQ ID NO: 2666 - DNA, 21 bp, synthetic construct
  misc_feature 1..21: note = n-mer motif encoding polynucleotide
  source 1..21: mol_type = other DNA
agtacggagggggcggctctg

SEQ ID NO: 2667 - protein, 7 aa, synthetic construct
  REGION 1..7: note = n-mer motif
SSSGAAR

SEQ ID NO: 2668 - DNA, 21 bp, synthetic construct
  misc_feature 1..21: note = n-mer motif encoding polynucleotide
  source 1..21: mol_type = other DNA
tcttcttcaggtgccgcccgc

SEQ ID NO: 2669 - protein, 7 aa, synthetic construct
  REGION 1..7: note = n-mer motif
VLASNGP

SEQ ID NO: 2670 - DNA, 21 bp, synthetic construct
  misc_feature 1..21: note = n-mer motif encoding polynucleotide
  source 1..21: mol_type = other DNA
gtgttagcgtccaacgggccg

SEQ ID NO: 2671 - protein, 7 aa, synthetic construct
  REGION 1..7: note = n-mer motif
VVQVTGR

SEQ ID NO: 2672 - DNA, 21 bp, synthetic construct
  misc_feature 1..21: note = n-mer motif encoding polynucleotide
  source 1..21: mol_type = other DNA
gttgttcaggttactgggcgt

SEQ ID NO: 2673 - protein, 7 aa, synthetic construct
  REGION 1..7: note = n-mer motif
FAVRLSS

SEQ ID NO: 2674 - DNA, 21 bp, synthetic construct
  misc_feature 1..21: note = n-mer motif encoding polynucleotide
  source 1..21: mol_type = other DNA
tttgctgtgcggttgtcgtcg

SEQ ID NO: 2675 - protein, 7 aa, synthetic construct
  REGION 1..7: note = n-mer motif
LVRDTKT

SEQ ID NO: 2676 - DNA, 21 bp, synthetic construct
  misc_feature 1..21: note = n-mer motif encoding polynucleotide
  source 1..21: mol_type = other DNA
ctcgtaagagacacaaaaacg

SEQ ID NO: 2677 - protein, 7 aa, synthetic construct
  REGION 1..7: note = n-mer motif
SGESLSR

SEQ ID NO: 2678 - DNA, 21 bp, synthetic construct
  misc_feature 1..21: note = n-mer motif encoding polynucleotide
  source 1..21: mol_type = other DNA
tctggcgaaagcttatctagg

SEQ ID NO: 2679 - protein, 7 aa, synthetic construct
  REGION 1..7: note = n-mer motif
TLANSQR

SEQ ID NO: 2680 - DNA, 21 bp, synthetic construct
  misc_feature 1..21: note = n-mer motif encoding polynucleotide
  source 1..21: mol_type = other DNA
actttggcgaattctcagcgg

SEQ ID NO: 2681 - protein, 7 aa, synthetic construct
  REGION 1..7: note = n-mer motif
SQEQRAR

SEQ ID NO: 2682 - DNA, 21 bp, synthetic construct
  misc_feature 1..21: note = n-mer motif encoding polynucleotide
  source 1..21: mol_type = other DNA
agtcaggagcagagggctcgt

SEQ ID NO: 2683 - protein, 7 aa, synthetic construct
  REGION 1..7: note = n-mer motif
SREGGNV

SEQ ID NO: 2684 - DNA, 21 bp, synthetic construct
  misc_feature 1..21: note = n-mer motif encoding polynucleotide
  source 1..21: mol_type = other DNA
agccgagaaggagggaacgta

SEQ ID NO: 2685 - protein, 7 aa, synthetic construct
  REGION 1..7: note = n-mer motif
LGGSSMG

SEQ ID NO: 2686 - DNA, 21 bp, synthetic construct
  misc_feature 1..21: note = n-mer motif encoding polynucleotide
  source 1..21: mol_type = other DNA
cttggtgggtcttcaatgggg

SEQ ID NO: 2687 - protein, 7 aa, synthetic construct
  REGION 1..7: note = n-mer motif
SGSTDKL

SEQ ID NO: 2688 - DNA, 21 bp, synthetic construct
  misc_feature 1..21: note = n-mer motif encoding polynucleotide
  source 1..21: mol_type = other DNA
tctggttcgactgataagttg

SEQ ID NO: 2689 - protein, 7 aa, synthetic construct
  REGION 1..7: note = n-mer motif
RDQQKLW

SEQ ID NO: 2690 - DNA, 21 bp, synthetic construct
  misc_feature 1..21: note = n-mer motif encoding polynucleotide
  source 1..21: mol_type = other DNA
cgggaccaacaaaaactgtgg

SEQ ID NO: 2691 - protein, 7 aa, synthetic construct
  REGION 1..7: note = n-mer motif
RVSEVGS

SEQ ID NO: 2692 - DNA, 21 bp, synthetic construct
  misc_feature 1..21: note = n-mer motif encoding polynucleotide
  source 1..21: mol_type = other DNA
cgcgtctcagaagttggcagc

SEQ ID NO: 2693 - protein, 7 aa, synthetic construct
  REGION 1..7: note = n-mer motif
LGFSPPR

SEQ ID NO: 2694 - DNA, 21 bp, synthetic construct
  misc_feature 1..21: note = n-mer motif encoding polynucleotide
  source 1..21: mol_type = other DNA
ctgggttttagtccgccgagg

SEQ ID NO: 2695 - protein, 7 aa, synthetic construct
  REGION 1..7: note = n-mer motif
SPADTRR

SEQ ID NO: 2696 - DNA, 21 bp, synthetic construct
  misc_feature 1..21: note = n-mer motif encoding polynucleotide
  source 1..21: mol_type = other DNA
tctcctgcggatactaggagg

SEQ ID NO: 2697 - protein, 7 aa, synthetic construct
  REGION 1..7: note = n-mer motif
LSRGDEM

SEQ ID NO: 2698 - DNA, 21 bp, synthetic construct
  misc_feature 1..21: note = n-mer motif encoding polynucleotide
  source 1..21: mol_type = other DNA
ttgagtcgcggagacgaaatg

SEQ ID NO: 2699 - protein, 7 aa, synthetic construct
  REGION 1..7: note = n-mer motif
RMQRTLY

SEQ ID NO: 2700 - DNA, 21 bp, synthetic construct
  misc_feature 1..21: note = n-mer motif encoding polynucleotide
  source 1..21: mol_type = other DNA
cgaatgcaacgaacattgtac

SEQ ID NO: 2701 - protein, 7 aa, synthetic construct
  REGION 1..7: note = n-mer motif
IANLAAS

SEQ ID NO: 2702 - DNA, 21 bp, synthetic construct
  misc_feature 1..21: note = n-mer motif encoding polynucleotide
  source 1..21: mol_type = other DNA
attgcgaatcttgctgcttcg

SEQ ID NO: 2703 - protein, 7 aa, synthetic construct
  REGION 1..7: note = n-mer motif
AGGVRDR

SEQ ID NO: 2704 - DNA, 21 bp, synthetic construct
  misc_feature 1..21: note = n-mer motif encoding polynucleotide
  source 1..21: mol_type = other DNA
gcgggtggtgttcgtgatcgt

SEQ ID NO: 2705 - protein, 7 aa, synthetic construct
  REGION 1..7: note = n-mer motif
GSGSGGL

SEQ ID NO: 2706 - DNA, 21 bp, synthetic construct
  misc_feature 1..21: note = n-mer motif encoding polynucleotide
  source 1..21: mol_type = other DNA
gggagtggatccggaggctta

SEQ ID NO: 2707 - protein, 7 aa, synthetic construct
  REGION 1..7: note = n-mer motif
TLANSER

SEQ ID NO: 2708 - DNA, 21 bp, synthetic construct
  misc_feature 1..21: note = n-mer motif encoding polynucleotide
  source 1..21: mol_type = other DNA
acactcgccaactcagaaagg

SEQ ID NO: 2709 - protein, 7 aa, synthetic construct
  REGION 1..7: note = n-mer motif
VNYSVAL

SEQ ID NO: 2710 - DNA, 21 bp, synthetic construct
  misc_feature 1..21: note = n-mer motif encoding polynucleotide
  source 1..21: mol_type = other DNA
gttaattattcggtggcgctt

SEQ ID NO: 2711 - protein, 7 aa, synthetic construct
  REGION 1..7: note = n-mer motif
KNPGVYT

SEQ ID NO: 2712 - DNA, 21 bp, synthetic construct
  misc_feature 1..21: note = n-mer motif encoding polynucleotide
  source 1..21: mol_type = other DNA
aagaatccgggggtgtatact

SEQ ID NO: 2713 - protein, 7 aa, synthetic construct
  REGION 1..7: note = n-mer motif
QREAARI

SEQ ID NO: 2714 - DNA, 21 bp, synthetic construct
  misc_feature 1..21: note = n-mer motif encoding polynucleotide
  source 1..21: mol_type = other DNA
cagcgtgaggcggcgcggatt

SEQ ID NO: 2715 - protein, 7 aa, synthetic construct
  REGION 1..7: note = n-mer motif
LSQGSQQ

SEQ ID NO: 2716 - DNA, 21 bp, synthetic construct
  misc_feature 1..21: note = n-mer motif encoding polynucleotide
  source 1..21: mol_type = other DNA
ctatcccaaggtagtcaacaa

SEQ ID NO: 2717 - protein, 7 aa, synthetic construct
  REGION 1..7: note = n-mer motif
NGSEGDR

SEQ ID NO: 2718 - DNA, 21 bp, synthetic construct
  misc_feature 1..21: note = n-mer motif encoding polynucleotide
  source 1..21: mol_type = other DNA
aacggttcggaaggggacagg

SEQ ID NO: 2719 - protein, 7 aa, synthetic construct
  REGION 1..7: note = n-mer motif
NVGVVQL

SEQ ID NO: 2720 - DNA, 21 bp, synthetic construct
  misc_feature 1..21: note = n-mer motif encoding polynucleotide
  source 1..21: mol_type = other DNA
aacgtaggcgtagtacaacta

SEQ ID NO: 2721 - protein, 6 aa, synthetic construct
  REGION 1..6: note = n-mer motif
TLAVPF

SEQ ID NO: 2722 - DNA, 21 bp, synthetic construct
  misc_feature 1..21: note = n-mer motif encoding polynucleotide
  source 1..21: mol_type = other DNA
actttggcggtgcctttttaa

SEQ ID NO: 2723 - protein, 7 aa, synthetic construct
  REGION 1..7: note = n-mer motif
HSLQTSA

SEQ ID NO: 2724 - DNA, 21 bp, synthetic construct
  misc_feature 1..21: note = n-mer motif encoding polynucleotide
  source 1..21: mol_type = other DNA
cactcattacaaacctctgcg

SEQ ID NO: 2725 - protein, 7 aa, synthetic construct
  REGION 1..7: note = n-mer motif
SATDVKH

SEQ ID NO: 2726 - DNA, 21 bp, synthetic construct
  misc_feature 1..21: note = n-mer motif encoding polynucleotide
  source 1..21: mol_type = other DNA
tcggcaacagacgtaaaacac

SEQ ID NO: 2727 - protein, 7 aa, synthetic construct
  REGION 1..7: note = n-mer motif
SGANLSY

SEQ ID NO: 2728 - DNA, 21 bp, synthetic construct
  misc_feature 1..21: note = n-mer motif encoding polynucleotide
  source 1..21: mol_type = other DNA
tctggtgcgaatttgtcttat

SEQ ID NO: 2729 - protein, 7 aa, synthetic construct
  REGION 1..7: note = n-mer motif
KAHDGEV

SEQ ID NO: 2730 - DNA, 21 bp, synthetic construct
  misc_feature 1..21: note = n-mer motif encoding polynucleotide
  source 1..21: mol_type = other DNA
aaagcgcacgacggcgaagtt

SEQ ID NO: 2731 - protein, 7 aa, synthetic construct
  REGION 1..7: note = n-mer motif
KASDTPM

SEQ ID NO: 2732 - DNA, 21 bp, synthetic construct
  misc_feature 1..21: note = n-mer motif encoding polynucleotide
  source 1..21: mol_type = other DNA
aaggcttctgatactcctatg

SEQ ID NO: 2733 - protein, 7 aa, synthetic construct
  REGION 1..7: note = n-mer motif
PGEHNKA

SEQ ID NO: 2734 - DNA, 21 bp, synthetic construct
  misc_feature 1..21: note = n-mer motif encoding polynucleotide
  source 1..21: mol_type = other DNA
ccgggtgagcataataaggct

SEQ ID NO: 2735 - protein, 7 aa, synthetic construct
  REGION 1..7: note = n-mer motif
NSAADRQ

SEQ ID NO: 2736 - DNA, 21 bp, synthetic construct
  misc_feature 1..21: note = n-mer motif encoding polynucleotide
  source 1..21: mol_type = other DNA
aatagtgcggctgatcgtcag

SEQ ID NO: 2737 - protein, 7 aa, synthetic construct
  REGION 1..7: note = n-mer motif
FTHGTGT

SEQ ID NO: 2738 - DNA, 21 bp, synthetic construct
  misc_feature 1..21: note = n-mer motif encoding polynucleotide
  source 1..21: mol_type = other DNA
ttcacgcacggcacaggcaca

SEQ ID NO: 2739 - protein, 7 aa, synthetic construct
  REGION 1..7: note = n-mer motif
LSNHGPI

SEQ ID NO: 2740 - DNA, 21 bp, synthetic construct
  misc_feature 1..21: note = n-mer motif encoding polynucleotide
  source 1..21: mol_type = other DNA
ctctccaaccacggcccgatc

SEQ ID NO: 2741 - protein, 7 aa, synthetic construct
  REGION 1..7: note = n-mer motif
GGASPVR

SEQ ID NO: 2742 - DNA, 21 bp, synthetic construct
  misc_feature 1..21: note = n-mer motif encoding polynucleotide
  source 1..21: mol_type = other DNA
gggggtgcttctcctgtgcgg

SEQ ID NO: 2743 - protein, 7 aa, synthetic construct
  REGION 1..7: note = n-mer motif
KLTNIGT

SEQ ID NO: 2744 - DNA, 21 bp, synthetic construct
  misc_feature 1..21: note = n-mer motif encoding polynucleotide
  source 1..21: mol_type = other DNA
aaacttaccaacataggcacg

SEQ ID NO: 2745 - protein, 7 aa, synthetic construct
  REGION 1..7: note = n-mer motif
PGSDGRT

SEQ ID NO: 2746 - DNA, 21 bp, synthetic construct
  misc_feature 1..21: note = n-mer motif encoding polynucleotide
  source 1..21: mol_type = other DNA
ccaggaagtgacggaaggacg

SEQ ID NO: 2747 - protein, 7 aa, synthetic construct
  REGION 1..7: note = n-mer motif
AGGGATR

SEQ ID NO: 2748 - DNA, 21 bp, synthetic construct
  misc_feature 1..21: note = n-mer motif encoding polynucleotide
  source 1..21: mol_type = other DNA
gccggtggaggcgccactcgc

SEQ ID NO: 2749 - protein, 7 aa, synthetic construct
  REGION 1..7: note = n-mer motif
GTGSTIV

SEQ ID NO: 2750 - DNA, 21 bp, synthetic construct
  misc_feature 1..21: note = n-mer motif encoding polynucleotide
  source 1..21: mol_type = other DNA
ggtacaggctccacaatcgta

SEQ ID NO: 2751 - protein, 7 aa, synthetic construct
  REGION 1..7: note = n-mer motif
SNGAGYL

SEQ ID NO: 2752 - DNA, 21 bp, synthetic construct
  misc_feature 1..21: note = n-mer motif encoding polynucleotide
  source 1..21: mol_type = other DNA
tccaacggagctgggtactta

SEQ ID NO: 2753 - protein, 7 aa, synthetic construct
  REGION 1..7: note = n-mer motif
GGTSSGH

SEQ ID NO: 2754 - DNA, 21 bp, synthetic construct
  misc_feature 1..21: note = n-mer motif encoding polynucleotide
  source 1..21: mol_type = other DNA
ggaggaacttccagcgggcac

SEQ ID NO: 2755 - protein, 7 aa, synthetic construct
  REGION 1..7: note = n-mer motif
AVLSQNI

SEQ ID NO: 2756 - DNA, 21 bp, synthetic construct
  misc_feature 1..21: note = n-mer motif encoding polynucleotide
  source 1..21: mol_type = other DNA
gctgtgttgtctcagaatatt

SEQ ID NO: 2757 - protein, 7 aa, synthetic construct
  REGION 1..7: note = n-mer motif
REEQKVW

SEQ ID NO: 2758 - DNA, 21 bp, synthetic construct
  misc_feature 1..21: note = n-mer motif encoding polynucleotide
  source 1..21: mol_type = other DNA
cgtgaggagcagaaggtttgg

SEQ ID NO: 2759 - protein, 7 aa, synthetic construct
  REGION 1..7: note = n-mer motif
PTQGTNR

SEQ ID NO: 2760 - DNA, 21 bp, synthetic construct
  misc_feature 1..21: note = n-mer motif encoding polynucleotide
  source 1..21: mol_type = other DNA
cccacacaaggaaccaaccgc

SEQ ID NO: 2761 - protein, 7 aa, synthetic construct
  REGION 1..7: note = n-mer motif
VTTVSNV

SEQ ID NO: 2762 - DNA, 21 bp, synthetic construct
  misc_feature 1..21: note = n-mer motif encoding polynucleotide
  source 1..21: mol_type = other DNA
gttacgaccgtgagcaacgtt

SEQ ID NO: 2763 - protein, 7 aa, synthetic construct
  REGION 1..7: note = n-mer motif
GNVNGGA

SEQ ID NO: 2764 - DNA, 21 bp, synthetic construct
  misc_feature 1..21: note = n-mer motif encoding polynucleotide
  source 1..21: mol_type = other DNA
ggtaacgtgaacggaggagcg

SEQ ID NO: 2765 - protein, 7 aa, synthetic construct
  REGION 1..7: note = n-mer motif
SVDSGRL

SEQ ID NO: 2766 - DNA, 21 bp, synthetic construct
  misc_feature 1..21: note = n-mer motif encoding polynucleotide
  source 1..21: mol_type = other DNA
tcggtcgactctggacgtttg

SEQ ID NO: 2767 - protein, 7 aa, synthetic construct
  REGION 1..7: note = n-mer motif
LSNHVPV

SEQ ID NO: 2768 - DNA, 21 bp, synthetic construct
  misc_feature 1..21: note = n-mer motif encoding polynucleotide
  source 1..21: mol_type = other DNA
ttatccaaccacgttccggtg

SEQ ID NO: 2769 - protein, 7 aa, synthetic construct
  REGION 1..7: note = n-mer motif
ASTATLW

SEQ ID NO: 2770 - DNA, 21 bp, synthetic construct
  misc_feature 1..21: note = n-mer motif encoding polynucleotide
  source 1..21: mol_type = other DNA
gcgtctactgctactctttgg

SEQ ID NO: 2771 - protein, 7 aa, synthetic construct
  REGION 1..7: note = n-mer motif
SDKPVNT

SEQ ID NO: 2772 - DNA, 21 bp, synthetic construct
  misc_feature 1..21: note = n-mer motif encoding polynucleotide
  source 1..21: mol_type = other DNA
tccgacaaaccagtcaacaca

SEQ ID NO: 2773 - protein, 7 aa, synthetic construct
  REGION 1..7: note = n-mer motif
NVQTVST

SEQ ID NO: 2774 - DNA, 21 bp, synthetic construct
  misc_feature 1..21: note = n-mer motif encoding polynucleotide
  source 1..21: mol_type = other DNA
aacgttcaaaccgtctcaact

SEQ ID NO: 2775 - protein, 7 aa, synthetic construct
  REGION 1..7: note = n-mer motif
RTSTDVV

SEQ ID NO: 2776 - DNA, 21 bp, synthetic construct
  misc_feature 1..21: note = n-mer motif encoding polynucleotide
  source 1..21: mol_type = other DNA
agaacttccacagacgtggta

SEQ ID NO: 2777 - protein, 7 aa, synthetic construct
  REGION 1..7: note = n-mer motif
KASDTPK

SEQ ID NO: 2778 - DNA, 21 bp, synthetic construct
  misc_feature 1..21: note = n-mer motif encoding polynucleotide
  source 1..21: mol_type = other DNA
aaagcgtccgacacaccgaaa

SEQ ID NO: 2779 - protein, 7 aa, synthetic construct
  REGION 1..7: note = n-mer motif
VQGPQNG

SEQ ID NO: 2780 - DNA, 21 bp, synthetic construct
  misc_feature 1..21: note = n-mer motif encoding polynucleotide
  source 1..21: mol_type = other DNA
gtgcagggtccgcagaatggt

SEQ ID NO: 2781 - protein, 7 aa, synthetic construct
  REGION 1..7: note = n-mer motif
GGTNSGH

SEQ ID NO: 2782 - DNA, 21 bp, synthetic construct
  misc_feature 1..21: note = n-mer motif encoding polynucleotide
  source 1..21: mol_type = other DNA
ggcggaaccaacagcggccac

SEQ ID NO: 2783 - protein, 7 aa, synthetic construct
  REGION 1..7: note = n-mer motif
GNSGGRF

SEQ ID NO: 2784 - DNA, 21 bp, synthetic construct
  misc_feature 1..21: note = n-mer motif encoding polynucleotide
  source 1..21: mol_type = other DNA
gggaatagtgggggtcgtttt

SEQ ID NO: 2785 - protein, 7 aa, synthetic construct
  REGION 1..7: note = n-mer motif
LAGLGGG

SEQ ID NO: 2786 - DNA, 21 bp, synthetic construct
  misc_feature 1..21: note = n-mer motif encoding polynucleotide
  source 1..21: mol_type = other DNA
ctagctgggctgggtggcggg

SEQ ID NO: 2787 - protein, 7 aa, synthetic construct
  REGION 1..7: note = n-mer motif
QLRDTKT

SEQ ID NO: 2788 - DNA, 21 bp, synthetic construct
  misc_feature 1..21: note = n-mer motif encoding polynucleotide
  source 1..21: mol_type = other DNA
cagctgcgtgatactaagact

SEQ ID NO: 2789 - protein, 7 aa, synthetic construct
  REGION 1..7: note = n-mer motif
MGVAGVH

SEQ ID NO: 2790 - DNA, 21 bp, synthetic construct
  misc_feature 1..21: note = n-mer motif encoding polynucleotide
  source 1..21: mol_type = other DNA
atgggtgttgctggagttcac

SEQ ID NO: 2791 - protein, 7 aa, synthetic construct
  REGION 1..7: note = n-mer motif
AVPGTYS

SEQ ID NO: 2792 - DNA, 21 bp, synthetic construct
  misc_feature 1..21: note = n-mer motif encoding polynucleotide
  source 1..21: mol_type = other DNA
gcggtgcctgggacgtattct

SEQ ID NO: 2793 - protein, 7 aa, synthetic construct
  REGION 1..7: note = n-mer motif
MAAKSTP

SEQ ID NO: 2794 - DNA, 21 bp, synthetic construct
  misc_feature 1..21: note = n-mer motif encoding polynucleotide
  source 1..21: mol_type = other DNA
atggctgcgaagtcgacgccg

SEQ ID NO: 2795 - protein, 7 aa, synthetic construct
  REGION 1..7: note = n-mer motif
QVRDTNT

SEQ ID NO: 2796 - DNA, 21 bp, synthetic construct
  misc_feature 1..21: note = n-mer motif encoding polynucleotide
  source 1..21: mol_type = other DNA
caggtgcgtgatactaatact

SEQ ID NO: 2797 - protein, 7 aa, synthetic construct
  REGION 1..7: note = n-mer motif
LHNLTQD

SEQ ID NO: 2798 - DNA, 21 bp, synthetic construct
  misc_feature 1..21: note = n-mer motif encoding polynucleotide
  source 1..21: mol_type = other DNA
cttcataatcttacgcaggat

SEQ ID NO: 2799 - protein, 7 aa, synthetic construct
  REGION 1..7: note = n-mer motif
PGNSASI

SEQ ID NO: 2800 - DNA, 21 bp, synthetic construct
  misc_feature 1..21: note = n-mer motif encoding polynucleotide
  source 1..21: mol_type = other DNA
ccaggaaactccgcatcgata

SEQ ID NO: 2801 - protein, 7 aa, synthetic construct
  REGION 1..7: note = n-mer motif
MGGGTNH

SEQ ID NO: 2802 - DNA, 21 bp, synthetic construct
  misc_feature 1..21: note = n-mer motif encoding polynucleotide
  source 1..21: mol_type = other DNA
atgggaggtgggaccaaccac

SEQ ID NO: 2803 - protein, 7 aa, synthetic construct
  REGION 1..7: note = n-mer motif
TLANSQR

SEQ ID NO: 2804 - DNA, 21 bp, synthetic construct
  misc_feature 1..21: note = n-mer motif encoding polynucleotide
  source 1..21: mol_type = other DNA
acactagccaacagtcaacgt

SEQ ID NO: 2805 - protein, 7 aa, synthetic construct
  REGION 1..7: note = n-mer motif
SAETLRL

SEQ ID NO: 2806 - DNA, 21 bp, synthetic construct
  misc_feature 1..21: note = n-mer motif encoding polynucleotide
  source 1..21: mol_type = other DNA
tctgcggagacgcttaggctt

SEQ ID NO: 2807 - protein, 7 aa, synthetic construct
  REGION 1..7: note = n-mer motif
MGGGANP

SEQ ID NO: 2808 - DNA, 21 bp, synthetic construct
  misc_feature 1..21: note = n-mer motif encoding polynucleotide
  source 1..21: mol_type = other DNA
atgggggggggtgctaatccg

SEQ ID NO: 2809 - protein, 7 aa, synthetic construct
  REGION 1..7: note = n-mer motif
GLAETRA

SEQ ID NO: 2810 - DNA, 21 bp, synthetic construct
  misc_feature 1..21: note = n-mer motif encoding polynucleotide
  source 1..21: mol_type = other DNA
gggcttgctgagactagggct

SEQ ID NO: 2811 - protein, 7 aa, synthetic construct
  REGION 1..7: note = n-mer motif
AMSSTVG

SEQ ID NO: 2812 - DNA, 21 bp, synthetic construct
  misc_feature 1..21: note = n-mer motif encoding polynucleotide
  source 1..21: mol_type = other DNA
gcaatgagttccaccgttggc

SEQ ID NO: 2813 - protein, 7 aa, synthetic construct
  REGION 1..7: note = n-mer motif
TGPQVSI

SEQ ID NO: 2814 - DNA, 21 bp, synthetic construct
  misc_feature 1..21: note = n-mer motif encoding polynucleotide
  source 1..21: mol_type = other DNA
actgggccgcaggttagtatt

SEQ ID NO: 2815 - protein, 7 aa, synthetic construct
  REGION 1..7: note = n-mer motif
SVDNGKR

SEQ ID NO: 2816 - DNA, 21 bp, synthetic construct
  misc_feature 1..21: note = n-mer motif encoding polynucleotide
  source 1..21: mol_type = other DNA
tcggtggataatgggaagcgg

SEQ ID NO: 2817 - protein, 7 aa, synthetic construct
  REGION 1..7: note = n-mer motif
NVSRDHS

SEQ ID NO: 2818 - DNA, 21 bp, synthetic construct
  misc_feature 1..21: note = n-mer motif encoding polynucleotide
  source 1..21: mol_type = other DNA
aacgtctcccgtgaccacagt

SEQ ID NO: 2819 - protein, 7 aa, synthetic construct
  REGION 1..7: note = n-mer motif
KSNSENS

SEQ ID NO: 2820 - DNA, 21 bp, synthetic construct
  misc_feature 1..21: note = n-mer motif encoding polynucleotide
  source 1..21: mol_type = other DNA
aagtcgaattcggagaatagt

SEQ ID NO: 2821 - protein, 7 aa, synthetic construct
  REGION 1..7: note = n-mer motif
VSLNEGH

SEQ ID NO: 2822 - DNA, 21 bp, synthetic construct
  misc_feature 1..21: note = n-mer motif encoding polynucleotide
  source 1..21: mol_type = other DNA
gtgtcgcttaatgaggggcat

SEQ ID NO: 2823 - protein, 7 aa, synthetic construct
  REGION 1..7: note = n-mer motif
VTADRTT

SEQ ID NO: 2824 - DNA, 21 bp, synthetic construct
  misc_feature 1..21: note = n-mer motif encoding polynucleotide
  source 1..21: mol_type = other DNA
gtgactgctgatcggactacg

SEQ ID NO: 2825 - protein, 7 aa, synthetic construct
  REGION 1..7: note = n-mer motif
VLGGTAG

SEQ ID NO: 2826 - DNA, 21 bp, synthetic construct
  misc_feature 1..21: note = n-mer motif encoding polynucleotide
  source 1..21: mol_type = other DNA
gtgctgggtggtactgcgggg

SEQ ID NO: 2827 - protein, 7 aa, synthetic construct
  REGION 1..7: note = n-mer motif
TAVNSTS

SEQ ID NO: 2828 - DNA, 21 bp, synthetic construct
  misc_feature 1..21: note = n-mer motif encoding polynucleotide
  source 1..21: mol_type = other DNA
acggctgtgaattcgacttcg

SEQ ID NO: 2829 - protein, 7 aa, synthetic construct
  REGION 1..7: note = n-mer motif
LSLTDVV

SEQ ID NO: 2830 - DNA, 21 bp, synthetic construct
  misc_feature 1..21: note = n-mer motif encoding polynucleotide
  source 1..21: mol_type = other DNA
ctgagtttgactgatgtggtt

SEQ ID NO: 2831 - protein, 7 aa, synthetic construct
  REGION 1..7: note = n-mer motif
PIHGASS

SEQ ID NO: 2832 - DNA, 21 bp, synthetic construct
  misc_feature 1..21: note = n-mer motif encoding polynucleotide
  source 1..21: mol_type = other DNA
ccgattcatggtgctagttcg

SEQ ID NO: 2833 - protein, 7 aa, synthetic construct
  REGION 1..7: note = n-mer motif
GINAVGP

SEQ ID NO: 2834 - DNA, 21 bp, synthetic construct
  misc_feature 1..21: note = n-mer motif encoding polynucleotide
  source 1..21: mol_type = other DNA
gggattaatgctgttggtccg

SEQ ID NO: 2835 - protein, 7 aa, synthetic construct
  REGION 1..7: note = n-mer motif
GSGTGVA

SEQ ID NO: 2836 - DNA, 21 bp, synthetic construct
  misc_feature 1..21: note = n-mer motif encoding polynucleotide
  source 1..21: mol_type = other DNA
ggttctgggacgggggtggct

SEQ ID NO: 2837 - protein, 7 aa, synthetic construct
  REGION 1..7: note = n-mer motif
RQQQKLW

SEQ ID NO: 2838 - DNA, 21 bp, synthetic construct
  misc_feature 1..21: note = n-mer motif encoding polynucleotide
  source 1..21: mol_type = other DNA
cgtcagcagcagaagctttgg

SEQ ID NO: 2839 - protein, 7 aa, synthetic construct
  REGION 1..7: note = n-mer motif
TGQTEMT

SEQ ID NO: 2840 - DNA, 21 bp, synthetic construct
  misc_feature 1..21: note = n-mer motif encoding polynucleotide
  source 1..21: mol_type = other DNA
acggggcagactgagatgact

SEQ ID NO: 2841 - protein, 7 aa, synthetic construct
  REGION 1..7: note = n-mer motif
VGNSSGV

SEQ ID NO: 2842 - DNA, 21 bp, synthetic construct
  misc_feature 1..21: note = n-mer motif encoding polynucleotide
  source 1..21: mol_type = other DNA
gtgggcaactcctctggggtt

SEQ ID NO: 2843 - protein, 7 aa, synthetic construct
  REGION 1..7: note = n-mer motif
FNSGTGT

SEQ ID NO: 2844 - DNA, 21 bp, synthetic construct
  misc_feature 1..21: note = n-mer motif encoding polynucleotide
  source 1..21: mol_type = other DNA
ttcaacagcgggactggcaca

SEQ ID NO: 2845 - protein, 7 aa, synthetic construct
  REGION 1..7: note = n-mer motif
KLAEGIR

SEQ ID NO: 2846 - DNA, 21 bp, synthetic construct
  misc_feature 1..21: note = n-mer motif encoding polynucleotide
  source 1..21: mol_type = other DNA
aagcttgctgaggggattagg

SEQ ID NO: 2847 - protein, 7 aa, synthetic construct
  REGION 1..7: note = n-mer motif
GNQGGTR

SEQ ID NO: 2848 - DNA, 21 bp, synthetic construct
  misc_feature 1..21: note = n-mer motif encoding polynucleotide
  source 1..21: mol_type = other DNA
ggtaatcagggggggacgcgt

SEQ ID NO: 2849 - protein, 7 aa, synthetic construct
  REGION 1..7: note = n-mer motif
GSESGVA

SEQ ID NO: 2850 - DNA, 21 bp, synthetic construct
  misc_feature 1..21: note = n-mer motif encoding polynucleotide
  source 1..21: mol_type = other DNA
ggttctgagtcgggggtggct

SEQ ID NO: 2851 - protein, 7 aa, synthetic construct
  REGION 1..7: note = n-mer motif
TSSRPEE

SEQ ID NO: 2852 - DNA, 21 bp, synthetic construct
  misc_feature 1..21: note = n-mer motif encoding polynucleotide
  source 1..21: mol_type = other DNA
acttcttctcggccggaggag

SEQ ID NO: 2853 - protein, 7 aa, synthetic construct
  REGION 1..7: note = n-mer motif
RSVGTSA

SEQ ID NO: 2854 - DNA, 21 bp, synthetic construct
  misc_feature 1..21: note = n-mer motif encoding polynucleotide
  source 1..21: mol_type = other DNA
cgttcggtgggtacttcggcg

SEQ ID NO: 2855 - protein, 7 aa, synthetic construct
  REGION 1..7: note = n-mer motif
AVVLNAL

SEQ ID NO: 2856 - DNA, 21 bp, synthetic construct
  misc_feature 1..21: note = n-mer motif encoding polynucleotide
  source 1..21: mol_type = other DNA
gcggtggtgctgaatgctttg

SEQ ID NO: 2857 - protein, 7 aa, synthetic construct
  REGION 1..7: note = n-mer motif
RTSTDVV

SEQ ID NO: 2858 - DNA, 21 bp, synthetic construct
  misc_feature 1..21: note = n-mer motif encoding polynucleotide
  source 1..21: mol_type = other DNA
aggacgagtacggatgttgtg

SEQ ID NO: 2859 - protein, 7 aa, synthetic construct
  REGION 1..7: note = n-mer motif
LRNTQLD

SEQ ID NO: 2860 - DNA, 21 bp, synthetic construct
  misc_feature 1..21: note = n-mer motif encoding polynucleotide
  source 1..21: mol_type = other DNA
ttgcggaatactcagttggat

SEQ ID NO: 2861 - protein, 7 aa, synthetic construct
  REGION 1..7: note = n-mer motif
IPPGVPR

SEQ ID NO: 2862 - DNA, 21 bp, synthetic construct
  misc_feature 1..21: note = n-mer motif encoding polynucleotide
  source 1..21: mol_type = other DNA
attccgcctggggttccgcgt

SEQ ID NO: 2863 - protein, 7 aa, synthetic construct
  REGION 1..7: note = n-mer motif
MNGGHIL

SEQ ID NO: 2864 - DNA, 21 bp, synthetic construct
  misc_feature 1..21: note = n-mer motif encoding polynucleotide
  source 1..21: mol_type = other DNA
atgaatgggggtcatattctg

SEQ ID NO: 2865 - protein, 7 aa, synthetic construct
  REGION 1..7: note = n-mer motif
RYVGESS

SEQ ID NO: 2866 - DNA, 21 bp, synthetic construct
  misc_feature 1..21: note = n-mer motif encoding polynucleotide
  source 1..21: mol_type = other DNA
aggtatgtgggggagtcttcg

SEQ ID NO: 2867 - protein, 7 aa, synthetic construct
  REGION 1..7: note = n-mer motif
PNGVSVV

SEQ ID NO: 2868 - DNA, 21 bp, synthetic construct
  misc_feature 1..21: note = n-mer motif encoding polynucleotide
  source 1..21: mol_type = other DNA
cctaatggtgtttctgtggtg

SEQ ID NO: 2869 - protein, 7 aa, synthetic construct
  REGION 1..7: note = n-mer motif
ASLGAYS

SEQ ID NO: 2870 - DNA, 21 bp, synthetic construct
  misc_feature 1..21: note = n-mer motif encoding polynucleotide
  source 1..21: mol_type = other DNA
gcgtcgcttggggcgtattcg

SEQ ID NO: 2871 - protein, 7 aa, synthetic construct
  REGION 1..7: note = n-mer motif
GSGSVVA

SEQ ID NO: 2872 - DNA, 21 bp, synthetic construct
  misc_feature 1..21: note = n-mer motif encoding polynucleotide
  source 1..21: mol_type = other DNA
ggttctgggtcggtggtggct

SEQ ID NO: 2873 - protein, 7 aa, synthetic construct
  REGION 1..7: note = n-mer motif
MGSNGQV

SEQ ID NO: 2874 - DNA, 21 bp, synthetic construct
  misc_feature 1..21: note = n-mer motif encoding polynucleotide
  source 1..21: mol_type = other DNA
atggggtctaatgggcaggtt

SEQ ID NO: 2875 - protein, 7 aa, synthetic construct
  REGION 1..7: note = n-mer motif
TGVLINS

SEQ ID NO: 2876 - DNA, 21 bp, synthetic construct
  misc_feature 1..21: note = n-mer motif encoding polynucleotide
  source 1..21: mol_type = other DNA
acgggtgttttgattaattcg

SEQ ID NO: 2877 - protein, 7 aa, synthetic construct
  REGION 1..7: note = n-mer motif
LSLTGGV

SEQ ID NO: 2878 - DNA, 21 bp, synthetic construct
  misc_feature 1..21: note = n-mer motif encoding polynucleotide
  source 1..21: mol_type = other DNA
ttgtcgctcaccgggggagtc

SEQ ID NO: 2879 - protein, 7 aa, synthetic construct
  REGION 1..7: note = n-mer motif
SPEGRNV

SEQ ID NO: 2880 - DNA, 21 bp, synthetic construct
  misc_feature 1..21: note = n-mer motif encoding polynucleotide
  source 1..21: mol_type = other DNA
tcgcccgaaggccgcaacgta

SEQ ID NO: 2881 - protein, 7 aa, synthetic construct
  REGION 1..7: note = n-mer motif
TIPNLSR

SEQ ID NO: 2882 - DNA, 21 bp, synthetic construct
  misc_feature 1..21: note = n-mer motif encoding polynucleotide
  source 1..21: mol_type = other DNA
acaataccgaacttatcgcgc

SEQ ID NO: 2883 - protein, 7 aa, synthetic construct
  REGION 1..7: note = n-mer motif
KNGGHVQ

SEQ ID NO: 2884 - DNA, 21 bp, synthetic construct
  misc_feature 1..21: note = n-mer motif encoding polynucleotide
  source 1..21: mol_type = other DNA
aaaaacggtgggcacgtacaa

SEQ ID NO: 2885 - protein, 7 aa, synthetic construct
  REGION 1..7: note = n-mer motif
ADLAGSR

SEQ ID NO: 2886 - DNA, 21 bp, synthetic construct
  misc_feature 1..21: note = n-mer motif encoding polynucleotide
  source 1..21: mol_type = other DNA
gcggatctggcggggtctagg

SEQ ID NO: 2887 - protein, 7 aa, synthetic construct
  REGION 1..7: note = n-mer motif
SYGSDSK

SEQ ID NO: 2888 - DNA, 21 bp, synthetic construct
  misc_feature 1..21: note = n-mer motif encoding polynucleotide
  source 1..21: mol_type = other DNA
tcttatggttctgattcgaag

SEQ ID NO: 2889 - protein, 7 aa, synthetic construct
  REGION 1..7: note = n-mer motif
SLGADVG

SEQ ID NO: 2890 - DNA, 21 bp, synthetic construct
  misc_feature 1..21: note = n-mer motif encoding polynucleotide
  source 1..21: mol_type = other DNA
agtttgggggcggatgttggg

SEQ ID NO: 2891 - protein, 7 aa, synthetic construct
  REGION 1..7: note = n-mer motif
TVLTGSF

SEQ ID NO: 2892 - DNA, 21 bp, synthetic construct
  misc_feature 1..21: note = n-mer motif encoding polynucleotide
  source 1..21: mol_type = other DNA
accgtcctcaccggaagcttc

SEQ ID NO: 2893 - protein, 7 aa, synthetic construct
  REGION 1..7: note = n-mer motif
GNSGGRF

SEQ ID NO: 2894 - DNA, 21 bp, synthetic construct
  misc_feature 1..21: note = n-mer motif encoding polynucleotide
  source 1..21: mol_type = other DNA
ggcaactcaggcggcaggttc

SEQ ID NO: 2895 - protein, 7 aa, synthetic construct
  REGION 1..7: note = n-mer motif
DRGGSTV

SEQ ID NO: 2896 - DNA, 21 bp, synthetic construct
  misc_feature 1..21: note = n-mer motif encoding polynucleotide
  source 1..21: mol_type = other DNA
gaccgtggggggtccaccgta

SEQ ID NO: 2897 - protein, 7 aa, synthetic construct
  REGION 1..7: note = n-mer motif
AGYSGTT

SEQ ID NO: 2898 - DNA, 21 bp, synthetic construct
  misc_feature 1..21: note = n-mer motif encoding polynucleotide
  source 1..21: mol_type = other DNA
gcaggttactccggtacgacg

SEQ ID NO: 2899 - protein, 7 aa, synthetic construct
  REGION 1..7: note = n-mer motif
KGSDSPM

SEQ ID NO: 2900 - DNA, 21 bp, synthetic construct
  misc_feature 1..21: note = n-mer motif encoding polynucleotide
  source 1..21: mol_type = other DNA
aagggttctgattctcctatg

SEQ ID NO: 2901 - protein, 7 aa, synthetic construct
  REGION 1..7: note = n-mer motif
DSHVSGY

SEQ ID NO: 2902 - DNA, 21 bp, synthetic construct
  misc_feature 1..21: note = n-mer motif encoding polynucleotide
  source 1..21: mol_type = other DNA
gactcgcacgtatcaggctac

SEQ ID NO: 2903 - protein, 7 aa, synthetic construct
  REGION 1..7: note = n-mer motif
KSHSEYS

SEQ ID NO: 2904 - DNA, 21 bp, synthetic construct
  misc_feature 1..21: note = n-mer motif encoding polynucleotide
  source 1..21: mol_type = other DNA
aagtcgcattcggagtatagt

SEQ ID NO: 2905 - protein, 7 aa, synthetic construct
  REGION 1..7: note = n-mer motif
PTQGTHP

SEQ ID NO: 2906 - DNA, 21 bp, synthetic construct
  misc_feature 1..21: note = n-mer motif encoding polynucleotide
  source 1..21: mol_type = other DNA
cctactcaggggacgcatccg

SEQ ID NO: 2907 - protein, 7 aa, synthetic construct
  REGION 1..7: note = n-mer motif
LEQSVAR

SEQ ID NO: 2908 - DNA, 21 bp, synthetic construct
  misc_feature 1..21: note = n-mer motif encoding polynucleotide
  source 1..21: mol_type = other DNA
ctcgaacaatctgtcgcacgc

SEQ ID NO: 2909 - protein, 7 aa, synthetic construct
  REGION 1..7: note = n-mer motif
KEIRASV

SEQ ID NO: 2910 - DNA, 21 bp, synthetic construct
  misc_feature 1..21: note = n-mer motif encoding polynucleotide
  source 1..21: mol_type = other DNA
aaggagattcgtgcgtcggtt

SEQ ID NO: 2911 - protein, 7 aa, synthetic construct
  REGION 1..7: note = n-mer motif
NAINRMV

SEQ ID NO: 2912 - DNA, 21 bp, synthetic construct
  misc_feature 1..21: note = n-mer motif encoding polynucleotide
  source 1..21: mol_type = other DNA
aatgcgattaatcgtatggtg

SEQ ID NO: 2913 - protein, 7 aa, synthetic construct
  REGION 1..7: note = n-mer motif
KIGENAS

SEQ ID NO: 2914 - DNA, 21 bp, synthetic construct
  misc_feature 1..21: note = n-mer motif encoding polynucleotide
  source 1..21: mol_type = other DNA
aaaatcggcgaaaacgcgagt

SEQ ID NO: 2915 - protein, 7 aa, synthetic construct
  REGION 1..7: note = n-mer motif
KMGGGVS

SEQ ID NO: 2916 - DNA, 21 bp, synthetic construct
  misc_feature 1..21: note = n-mer motif encoding polynucleotide
  source 1..21: mol_type = other DNA
aagatgggtggtggggtgtcg

SEQ ID NO: 2917 - protein, 7 aa, synthetic construct
  REGION 1..7: note = n-mer motif
EVGNVSR

SEQ ID NO: 2918 - DNA, 21 bp, synthetic construct
  misc_feature 1..21: note = n-mer motif encoding polynucleotide
  source 1..21: mol_type = other DNA
gaggtggggaatgtgtctcgt

SEQ ID NO: 2919 - protein, 7 aa, synthetic construct
  REGION 1..7: note = n-mer motif
RVTTHTQ

SEQ ID NO: 2920 - DNA, 21 bp, synthetic construct
  misc_feature 1..21: note = n-mer motif encoding polynucleotide
  source 1..21: mol_type = other DNA
cgtgttactactcatacgcag

SEQ ID NO: 2921 - protein, 7 aa, synthetic construct
  REGION 1..7: note = n-mer motif
AGFSNQT

SEQ ID NO: 2922 - DNA, 21 bp, synthetic construct
  misc_feature 1..21: note = n-mer motif encoding polynucleotide
  source 1..21: mol_type = other DNA
gccggattctcgaaccaaact

SEQ ID NO: 2923 - protein, 7 aa, synthetic construct
  REGION 1..7: note = n-mer motif
QREAARI

SEQ ID NO: 2924 - DNA, 21 bp, synthetic construct
  misc_feature 1..21: note = n-mer motif encoding polynucleotide
  source 1..21: mol_type = other DNA
caaagggaagctgcacgcatc

SEQ ID NO: 2925 - protein, 7 aa, synthetic construct
  REGION 1..7: note = n-mer motif
LSLNTKT

SEQ ID NO: 2926 - DNA, 21 bp, synthetic construct
  misc_feature 1..21: note = n-mer motif encoding polynucleotide
  source 1..21: mol_type = other DNA
ctatccctaaacaccaaaacc

SEQ ID NO: 2927 - protein, 7 aa, synthetic construct
  REGION 1..7: note = n-mer motif
RGGVSSV

SEQ ID NO: 2928 - DNA, 21 bp, synthetic construct
  misc_feature 1..21: note = n-mer motif encoding polynucleotide
  source 1..21: mol_type = other DNA
cgtggtggagtttctagtgtt

SEQ ID NO: 2929 - protein, 7 aa, synthetic construct
  REGION 1..7: note = n-mer motif
ENRVNNA

SEQ ID NO: 2930 - DNA, 21 bp, synthetic construct
  misc_feature 1..21: note = n-mer motif encoding polynucleotide
  source 1..21: mol_type = other DNA
gaaaacagagtgaacaacgca

SEQ ID NO: 2931 - protein, 7 aa, synthetic construct
  REGION 1..7: note = n-mer motif
SNGGRVE

SEQ ID NO: 2932 - DNA, 21 bp, synthetic construct
  misc_feature 1..21: note = n-mer motif encoding polynucleotide
  source 1..21: mol_type = other DNA
agtaacggcggacgcgttgaa

SEQ ID NO: 2933 - protein, 7 aa, synthetic construct
  REGION 1..7: note = n-mer motif
GVKNTNI

SEQ ID NO: 2934 - DNA, 21 bp, synthetic construct
  misc_feature 1..21: note = n-mer motif encoding polynucleotide
  source 1..21: mol_type = other DNA
ggcgtcaaaaacacgaacatc

SEQ ID NO: 2935 - protein, 7 aa, synthetic construct
  REGION 1..7: note = n-mer motif
SDRTHAS

SEQ ID NO: 2936 - DNA, 21 bp, synthetic construct
  misc_feature 1..21: note = n-mer motif encoding polynucleotide
  source 1..21: mol_type = other DNA
tcggatcggactcatgcgtcg

SEQ ID NO: 2937 - protein, 7 aa, synthetic construct
  REGION 1..7: note = n-mer motif
GSGSGVL

SEQ ID NO: 2938 - DNA, 21 bp, synthetic construct
  misc_feature 1..21: note = n-mer motif encoding polynucleotide
  source 1..21: mol_type = other DNA
ggttctgggtcgggggtgctg

SEQ ID NO: 2939 - protein, 7 aa, synthetic construct
  REGION 1..7: note = n-mer motif
AEGTDGV

SEQ ID NO: 2940 - DNA, 21 bp, synthetic construct
  misc_feature 1..21: note = n-mer motif encoding polynucleotide
  source 1..21: mol_type = other DNA
gccgaagggacggacggcgtc

SEQ ID NO: 2941 - protein, 7 aa, synthetic construct
  REGION 1..7: note = n-mer motif
GGKGEGP

SEQ ID NO: 2942 - DNA, 21 bp, synthetic construct
  misc_feature 1..21: note = n-mer motif encoding polynucleotide
  source 1..21: mol_type = other DNA
ggtgggaagggtgagggtccg

SEQ ID NO: 2943 - protein, 7 aa, synthetic construct
  REGION 1..7: note = n-mer motif
TAVKVSG

SEQ ID NO: 2944 - DNA, 21 bp, synthetic construct
  misc_feature 1..21: note = n-mer motif encoding polynucleotide
  source 1..21: mol_type = other DNA
acggctgtgaaggttagtggt

SEQ ID NO: 2945 - protein, 7 aa, synthetic construct
  REGION 1..7: note = n-mer motif
TTGEGIR

SEQ ID NO: 2946 - DNA, 21 bp, synthetic construct
  misc_feature 1..21: note = n-mer motif encoding polynucleotide
  source 1..21: mol_type = other DNA
actacgggtgagggtattcgt

SEQ ID NO: 2947 - protein, 7 aa, synthetic construct
  REGION 1..7: note = n-mer motif
LLASGAK

SEQ ID NO: 2948 - DNA, 21 bp, synthetic construct
  misc_feature 1..21: note = n-mer motif encoding polynucleotide
  source 1..21: mol_type = other DNA
ctgcttgcgagtggggctaag

SEQ ID NO: 2949 - protein, 7 aa, synthetic construct
  REGION 1..7: note = n-mer motif
SLGTMTL

SEQ ID NO: 2950 - DNA, 21 bp, synthetic construct
  misc_feature 1..21: note = n-mer motif encoding polynucleotide
  source 1..21: mol_type = other DNA
tctcttggaaccatgaccctc

SEQ ID NO: 2951 - protein, 7 aa, synthetic construct
  REGION 1..7: note = n-mer motif
RSEGTSA

SEQ ID NO: 2952 - DNA, 21 bp, synthetic construct
  misc_feature 1..21: note = n-mer motif encoding polynucleotide
  source 1..21: mol_type = other DNA
cgttcggagggtacttcggcg

SEQ ID NO: 2953 - protein, 7 aa, synthetic construct
  REGION 1..7: note = n-mer motif
TNGQASR

SEQ ID NO: 2954 - DNA, 21 bp, synthetic construct
  misc_feature 1..21: note = n-mer motif encoding polynucleotide
  source 1..21: mol_type = other DNA
actaatggtcaggcgtctagg

SEQ ID NO: 2955 - protein, 7 aa, synthetic construct
  REGION 1..7: note = n-mer motif
LGHKAGG

SEQ ID NO: 2956 - DNA, 21 bp, synthetic construct
  misc_feature 1..21: note = n-mer motif encoding polynucleotide
  source 1..21: mol_type = other DNA
ttggggcataaggctggtggt

SEQ ID NO: 2957 - protein, 7 aa, synthetic construct
  REGION 1..7: note = n-mer motif
VVAGTYS

SEQ ID NO: 2958 - DNA, 21 bp, synthetic construct
  misc_feature 1..21: note = n-mer motif encoding polynucleotide
  source 1..21: mol_type = other DNA
gtggtggctgggacgtattct

SEQ ID NO: 2959 - protein, 7 aa, synthetic construct
  REGION 1..7: note = n-mer motif
SGEQIRL

SEQ ID NO: 2960 - DNA, 21 bp, synthetic construct
  misc_feature 1..21: note = n-mer motif encoding polynucleotide
  source 1..21: mol_type = other DNA
tctggggagcagattaggctt

SEQ ID NO: 2961 - protein, 7 aa, synthetic construct
  REGION 1..7: note = n-mer motif
RGGVTGE

SEQ ID NO: 2962 - DNA, 21 bp, synthetic construct
  misc_feature 1..21: note = n-mer motif encoding polynucleotide
  source 1..21: mol_type = other DNA
cgggggggtgttactggtgag

SEQ ID NO: 2963 - protein, 7 aa, synthetic construct
  REGION 1..7: note = n-mer motif
VSSEAPL

SEQ ID NO: 2964 - DNA, 21 bp, synthetic construct
  misc_feature 1..21: note = n-mer motif encoding polynucleotide
  source 1..21: mol_type = other DNA
gtgtcttcggaggcgccgctg

SEQ ID NO: 2965 - protein, 7 aa, synthetic construct
  REGION 1..7: note = n-mer motif
RGPDHKT

SEQ ID NO: 2966 - DNA, 21 bp, synthetic construct
  misc_feature 1..21: note = n-mer motif encoding polynucleotide
  source 1..21: mol_type = other DNA
agaggccccgaccacaaaact

SEQ ID NO: 2967 - protein, 7 aa, synthetic construct
  REGION 1..7: note = n-mer motif
QAHGGPR

SEQ ID NO: 2968 - DNA, 21 bp, synthetic construct
  misc_feature 1..21: note = n-mer motif encoding polynucleotide
  source 1..21: mol_type = other DNA
caggcgcatggggggcctcgt

SEQ ID NO: 2969 - protein, 7 aa, synthetic construct
  REGION 1..7: note = n-mer motif
LLTDKRV

SEQ ID NO: 2970 - DNA, 21 bp, synthetic construct
  misc_feature 1..21: note = n-mer motif encoding polynucleotide
  source 1..21: mol_type = other DNA
cttcttactgataagcgtgtg

SEQ ID NO: 2971 - protein, 7 aa, synthetic construct
  REGION 1..7: note = n-mer motif
TSPGAGL

SEQ ID NO: 2972 - DNA, 21 bp, synthetic construct
  misc_feature 1..21: note = n-mer motif encoding polynucleotide
  source 1..21: mol_type = other DNA
acttctccgggtgcggggctg

SEQ ID NO: 2973 - protein, 7 aa, synthetic construct
  REGION 1..7: note = n-mer motif
LTDSRPV

SEQ ID NO: 2974 - DNA, 21 bp, synthetic construct
  misc_feature 1..21: note = n-mer motif encoding polynucleotide
  source 1..21: mol_type = other DNA
ttgacggatagtaggcctgtt

SEQ ID NO: 2975 - protein, 7 aa, synthetic construct
  REGION 1..7: note = n-mer motif
RSEVNGV

SEQ ID NO: 2976 - DNA, 21 bp, synthetic construct
  misc_feature 1..21: note = n-mer motif encoding polynucleotide
  source 1..21: mol_type = other DNA
cgttccgaagtaaacggtgtg

SEQ ID NO: 2977 - protein, 7 aa, synthetic construct
  REGION 1..7: note = n-mer motif
SPGLSIS

SEQ ID NO: 2978 - DNA, 21 bp, synthetic construct
  misc_feature 1..21: note = n-mer motif encoding polynucleotide
  source 1..21: mol_type = other DNA
agtcctgggctgtctattagt

SEQ ID NO: 2979 - protein, 7 aa, synthetic construct
  REGION 1..7: note = n-mer motif
SGSLVGA

SEQ ID NO: 2980 - DNA, 21 bp, synthetic construct
  misc_feature 1..21: note = n-mer motif encoding polynucleotide
  source 1..21: mol_type = other DNA
tcagggagcctagttggtgcc

SEQ ID NO: 2981 - protein, 7 aa, synthetic construct
  REGION 1..7: note = n-mer motif
MVDKPSE

SEQ ID NO: 2982 - DNA, 21 bp, synthetic construct
  misc_feature 1..21: note = n-mer motif encoding polynucleotide
  source 1..21: mol_type = other DNA
atggttgataagccttctgag

SEQ ID NO: 2983 - protein, 7 aa, synthetic construct
  REGION 1..7: note = n-mer motif
TPSAFPN

SEQ ID NO: 2984 - DNA, 21 bp, synthetic construct
  misc_feature 1..21: note = n-mer motif encoding polynucleotide
  source 1..21: mol_type = other DNA
actccgtcggcttttcctaat

SEQ ID NO: 2985 - protein, 7 aa, synthetic construct
  REGION 1..7: note = n-mer motif
MSLNDGV

SEQ ID NO: 2986 - DNA, 21 bp, synthetic construct
  misc_feature 1..21: note = n-mer motif encoding polynucleotide
  source 1..21: mol_type = other DNA
atgagtttgaatgatggggtt

SEQ ID NO: 2987 - protein, 7 aa, synthetic construct
  REGION 1..7: note = n-mer motif
TTEAIVR

SEQ ID NO: 2988 - DNA, 21 bp, synthetic construct
  misc_feature 1..21: note = n-mer motif encoding polynucleotide
  source 1..21: mol_type = other DNA
actactgaagcgatcgtccgc

SEQ ID NO: 2989 - protein, 7 aa, synthetic construct
  REGION 1..7: note = n-mer motif
SLVNASF

SEQ ID NO: 2990 - DNA, 21 bp, synthetic construct
  misc_feature 1..21: note = n-mer motif encoding polynucleotide
  source 1..21: mol_type = other DNA
agtctggttaatgcttcgttt

SEQ ID NO: 2991 - protein, 7 aa, synthetic construct
  REGION 1..7: note = n-mer motif
LSNHRPV

SEQ ID NO: 2992 - DNA, 21 bp, synthetic construct
  misc_feature 1..21: note = n-mer motif encoding polynucleotide
  source 1..21: mol_type = other DNA
ctaagcaaccaccgaccagtg

SEQ ID NO: 2993 - protein, 7 aa, synthetic construct
  REGION 1..7: note = n-mer motif
GSGSGVL

SEQ ID NO: 2994 - DNA, 21 bp, synthetic construct
  misc_feature 1..21: note = n-mer motif
  source 1..21: mol_type = other DNA
ggctcgggatcaggtgtactc

SEQ ID NO: 2995 - protein, 7 aa, synthetic construct
  REGION 1..7: note = n-mer motif
AMSSTVG

SEQ ID NO: 2996 - DNA, 21 bp, synthetic construct
  misc_feature 1..21: note = n-mer motif encoding polynucleotide
  source 1..21: mol_type = other DNA
gcgatgtcgagtactgtgggt

SEQ ID NO: 2997 - protein, 7 aa, synthetic construct
  REGION 1..7: note = n-mer motif
GMVTNHV

SEQ ID NO: 2998 - DNA, 21 bp, synthetic construct
  misc_feature 1..21: note = n-mer motif encoding polynucleotide
  source 1..21: mol_type = other DNA
ggcatggttactaaccacgtt

SEQ ID NO: 2999 - protein, 7 aa, synthetic construct
  REGION 1..7: note = n-mer motif
KMGGGVS

SEQ ID NO: 3000 - DNA, 21 bp, synthetic construct
  misc_feature 1..21: note = n-mer motif encoding polynucleotide
  source 1..21: mol_type = other DNA
aaaatgggcgggggtgttagc

SEQ ID NO: 3001 - protein, 7 aa, synthetic construct
  REGION 1..7: note = n-mer motif
KSDRGVV

SEQ ID NO: 3002 - DNA, 21 bp, synthetic construct
  misc_feature 1..21: note = n-mer motif
  source 1..21: mol_type = other DNA
aagtcggatcgtggggttgtt

SEQ ID NO: 3003 - protein, 7 aa, synthetic construct
  REGION 1..7: note = n-mer motif
QLRDTKT

SEQ ID NO: 3004 - DNA, 21 bp, synthetic construct
  misc_feature 1..21: note = n-mer motif encoding polynucleotide
  source 1..21: mol_type = other DNA
caacttcgcgacacgaaaacg

SEQ ID NO: 3005 - protein, 7 aa, synthetic construct
  REGION 1..7: note = n-mer motif
VANGFPR

SEQ ID NO: 3006 - DNA, 21 bp, synthetic construct
  misc_feature 1..21: note = n-mer motif encoding polynucleotide
  source 1..21: mol_type = other DNA
gtcgctaacggcttccccaga

SEQ ID NO: 3007 - protein, 7 aa, synthetic construct
  REGION 1..7: note = n-mer motif
YVNGATE

SEQ ID NO: 3008 - DNA, 21 bp, synthetic construct
  misc_feature 1..21: note = n-mer motif encoding polynucleotide
  source 1..21: mol_type = other DNA
tatgtgaatggggcgactgag

SEQ ID NO: 3009 - protein, 7 aa, synthetic construct
  REGION 1..7: note = n-mer motif
QVTDNKT

SEQ ID NO: 3010 - DNA, 21 bp, synthetic construct
  misc_feature 1..21: note = n-mer motif encoding polynucleotide
  source 1..21: mol_type = other DNA
caagtcaccgacaacaaaacg

SEQ ID NO: 3011 - protein, 7 aa, synthetic construct
  REGION 1..7: note = n-mer motif
PGHGPER

SEQ ID NO: 3012 - DNA, 21 bp, synthetic construct
  misc_feature 1..21: note = n-mer motif encoding polynucleotide
  source 1..21: mol_type = other DNA
cctggtcatggtccggagagg

SEQ ID NO: 3013 - protein, 7 aa, synthetic construct
  REGION 1..7: note = n-mer motif
MLGQAGG

SEQ ID NO: 3014 - DNA, 21 bp, synthetic construct
  misc_feature 1..21: note = n-mer motif encoding polynucleotide
  source 1..21: mol_type = other DNA
atgctgggtcaggctgggggg

SEQ ID NO: 3015 - protein, 7 aa, synthetic construct
  REGION 1..7: note = n-mer motif
APDSTVR

SEQ ID NO: 3016 - DNA, 21 bp, synthetic construct
  misc_feature 1..21: note = n-mer motif encoding polynucleotide
  source 1..21: mol_type = other DNA
gcgccggatagtactgtgcgg

SEQ ID NO: 3017 - protein, 7 aa, synthetic construct
  REGION 1..7: note = n-mer motif
SHSSDSK

SEQ ID NO: 3018 - DNA, 21 bp, synthetic construct
  misc_feature 1..21: note = n-mer motif encoding polynucleotide
  source 1..21: mol_type = other DNA
tctcatagttctgattcgaag

SEQ ID NO: 3019 - protein, 7 aa, synthetic construct
  REGION 1..7: note = n-mer motif
GLHGQSA

SEQ ID NO: 3020 - DNA, 21 bp, synthetic construct
  misc_feature 1..21: note = n-mer motif encoding polynucleotide
  source 1..21: mol_type = other DNA
ggcctccacggacaatccgcc

SEQ ID NO: 3021 - protein, 7 aa, synthetic construct
  REGION 1..7: note = n-mer motif
NLGVGQM

SEQ ID NO: 3022 - DNA, 21 bp, synthetic construct
  misc_feature 1..21: note = n-mer motif encoding polynucleotide
  source 1..21: mol_type = other DNA
aacttaggagtaggccaaatg

SEQ ID NO: 3023 - protein, 7 aa, synthetic construct
  REGION 1..7: note = n-mer motif
FISSTMR

SEQ ID NO: 3024 - DNA, 21 bp, synthetic construct
  misc_feature 1..21: note = n-mer motif encoding polynucleotide
  source 1..21: mol_type = other DNA
tttatttctagtacgatgcgt

SEQ ID NO: 3025 - protein, 7 aa, synthetic construct
  REGION 1..7: note = n-mer motif
DGTQSGR

SEQ ID NO: 3026 - DNA, 21 bp, synthetic construct
  misc_feature 1..21: note = n-mer motif encoding polynucleotide
  source 1..21: mol_type = other DNA
gacggcacacaatccggcagg

SEQ ID NO: 3027 - protein, 7 aa, synthetic construct
  REGION 1..7: note = n-mer motif
MAGKSSP

SEQ ID NO: 3028 - DNA, 21 bp, synthetic construct
  misc_feature 1..21: note = n-mer motif encoding polynucleotide
  source 1..21: mol_type = other DNA
atggcgggaaaaagttctcca

SEQ ID NO: 3029 - protein, 7 aa, synthetic construct
  REGION 1..7: note = n-mer motif
LSTGAQM

SEQ ID NO: 3030 - DNA, 21 bp, synthetic construct
  misc_feature 1..21: note = n-mer motif encoding polynucleotide
  source 1..21: mol_type = other DNA
ctttcgacgggtgcgcagatg

SEQ ID NO: 3031 - protein, 7 aa, synthetic construct
  REGION 1..7: note = n-mer motif
NGGSEKR

SEQ ID NO: 3032 - DNA, 21 bp, synthetic construct
  misc_feature 1..21: note = n-mer motif encoding polynucleotide
  source 1..21: mol_type = other DNA
aatggtggttctgagaagcgt

SEQ ID NO: 3033 - protein, 7 aa, synthetic construct
  REGION 1..7: note = n-mer motif
EDRSTTP

SEQ ID NO: 3034 - DNA, 21 bp, synthetic construct
  misc_feature 1..21: note = n-mer motif encoding polynucleotide
  source 1..21: mol_type = other DNA
gaggatcggtcgactactcct

SEQ ID NO: 3035 - protein, 7 aa, synthetic construct
  REGION 1..7: note = n-mer motif
GSVSSTK

SEQ ID NO: 3036 - DNA, 21 bp, synthetic construct
  misc_feature 1..21: note = n-mer motif encoding polynucleotide
  source 1..21: mol_type = other DNA
ggctcggtatcctcaacaaaa

SEQ ID NO: 3037 - protein, 7 aa, synthetic construct
  REGION 1..7: note = n-mer motif
KNPGVDP

SEQ ID NO: 3038 - DNA, 21 bp, synthetic construct
  misc_feature 1..21: note = n-mer motif encoding polynucleotide
  source 1..21: mol_type = other DNA
aagaatccgggggtggatcct

SEQ ID NO: 3039 - protein, 7 aa, synthetic construct
  REGION 1..7: note = n-mer motif
SPSALPN

SEQ ID NO: 3040 - DNA, 21 bp, synthetic construct
  misc_feature 1..21: note = n-mer motif encoding polynucleotide
  source 1..21: mol_type = other DNA
tcaccctcagccctcccgaac

SEQ ID NO: 3041 - protein, 7 aa, synthetic construct
  REGION 1..7: note = n-mer motif
LPSLTGG

SEQ ID NO: 3042 - DNA, 21 bp, synthetic construct
  misc_feature 1..21: note = n-mer motif encoding polynucleotide
  source 1..21: mol_type = other DNA
cttccgagtttgactgggggt

SEQ ID NO: 3043 - protein, 7 aa, synthetic construct
  REGION 1..7: note = n-mer motif
TDRSDKG

SEQ ID NO: 3044 - DNA, 21 bp, synthetic construct
  misc_feature 1..21: note = n-mer motif encoding polynucleotide
  source 1..21: mol_type = other DNA
actgataggtctgataagggg

SEQ ID NO: 3045 - protein, 7 aa, synthetic construct
  REGION 1..7: note = n-mer motif
AQQGSTL

SEQ ID NO: 3046 - DNA, 21 bp, synthetic construct
  misc_feature 1..21: note = n-mer motif
  source 1..21: mol_type = other DNA
gctcagcaggggtctacgctg

SEQ ID NO: 3047 - protein, 7 aa, synthetic construct
  REGION 1..7: note = n-mer motif
VLESNPR

SEQ ID NO: 3048 - DNA, 21 bp, synthetic construct
  misc_feature 1..21: note = n-mer motif encoding polynucleotide
  source 1..21: mol_type = other DNA
gtgcttgagtcgaatccgcgg

SEQ ID NO: 3049 - protein, 7 aa, synthetic construct
  REGION 1..7: note = n-mer motif
RIVGSDP

SEQ ID NO: 3050 - DNA, 21 bp, synthetic construct
  misc_feature 1..21: note = n-mer motif encoding polynucleotide
  source 1..21: mol_type = other DNA
aggattgtgggtagtgatccg

SEQ ID NO: 3051 - protein, 7 aa, synthetic construct
  REGION 1..7: note = n-mer motif
LSMTHGV

SEQ ID NO: 3052 - DNA, 21 bp, synthetic construct
  misc_feature 1..21: note = n-mer motif encoding polynucleotide
  source 1..21: mol_type = other DNA
ctgagtatgactcatggggtt

SEQ ID NO: 3053 - protein, 7 aa, synthetic construct
  REGION 1..7: note = n-mer motif
KLAERIR

SEQ ID NO: 3054 - DNA, 21 bp, synthetic construct
  misc_feature 1..21: note = n-mer motif encoding polynucleotide
  source 1..21: mol_type = other DNA
aaactcgcggaacgtatccgg

SEQ ID NO: 3055 - protein, 7 aa, synthetic construct
  REGION 1..7: note = n-mer motif
VSAGLGI

SEQ ID NO: 3056 - DNA, 21 bp, synthetic construct
  misc_feature 1..21: note = n-mer motif encoding polynucleotide
  source 1..21: mol_type = other DNA
gtctcggcaggtttaggaatc

SEQ ID NO: 3057 - protein, 7 aa, synthetic construct
  REGION 1..7: note = n-mer motif
NSKDVLR

SEQ ID NO: 3058 - DNA, 21 bp, synthetic construct
  misc_feature 1..21: note = n-mer motif encoding polynucleotide
  source 1..21: mol_type = other DNA
aactcgaaagacgtcctccga

SEQ ID NO: 3059 - protein, 7 aa, synthetic construct
  REGION 1..7: note = n-mer motif
SMQSPST

SEQ ID NO: 3060 - DNA, 21 bp, synthetic construct
  misc_feature 1..21: note = n-mer motif encoding polynucleotide
  source 1..21: mol_type = other DNA
tctatgcagtcgcctagtacg

SEQ ID NO: 3061 - protein, 7 aa, synthetic construct
  REGION 1..7: note = n-mer motif
TLNSATT

SEQ ID NO: 3062 - DNA, 21 bp, synthetic construct
  misc_feature 1..21: note = n-mer motif encoding polynucleotide
  source 1..21: mol_type = other DNA
acgcttaattcggcgactact

SEQ ID NO: 3063 - protein, 7 aa, synthetic construct
  REGION 1..7: note = n-mer motif
SGESLRL

SEQ ID NO: 3064 - DNA, 21 bp, synthetic construct
  misc_feature 1..21: note = n-mer motif encoding polynucleotide
  source 1..21: mol_type = other DNA
tctggggagtcgcttaggctt

SEQ ID NO: 3065 - protein, 7 aa, synthetic construct
  REGION 1..7: note = n-mer motif
QVRDIKT

SEQ ID NO: 3066 - DNA, 21 bp, synthetic construct
  misc_feature 1..21: note = n-mer motif encoding polynucleotide
  source 1..21: mol_type = other DNA
caggtgcgtgatattaagact

SEQ ID NO: 3067 - protein, 7 aa, synthetic construct
  REGION 1..7: note = n-mer motif
QGGNAMR

SEQ ID NO: 3068 - DNA, 21 bp, synthetic construct
  misc_feature 1..21: note = n-mer motif encoding polynucleotide
  source 1..21: mol_type = other DNA
cagggtgggaatgctatgcgt

SEQ ID NO: 3069 - protein, 7 aa, synthetic construct
  REGION 1..7: note = n-mer motif
MLGGGES

SEQ ID NO: 3070 - DNA, 21 bp, synthetic construct
  misc_feature 1..21: note = n-mer motif encoding polynucleotide
  source 1..21: mol_type = other DNA
atgttgggtggtggggagtcg

SEQ ID NO: 3071 - protein, 7 aa, synthetic construct
  REGION 1..7: note = n-mer motif
PTQGTLR

SEQ ID NO: 3072 - DNA, 21 bp, synthetic construct
  misc_feature 1..21: note = n-mer motif encoding polynucleotide
  source 1..21: mol_type = other DNA
ccgacacaaggtacactacgc

SEQ ID NO: 3073 - protein, 7 aa, synthetic construct
  REGION 1..7: note = n-mer motif
VIAGLAI

SEQ ID NO: 3074 - DNA, 21 bp, synthetic construct
  misc_feature 1..21: note = n-mer motif encoding polynucleotide
  source 1..21: mol_type = other DNA
gtaatcgccggactcgccatc

SEQ ID NO: 3075 - protein, 7 aa, synthetic construct
  REGION 1..7: note = n-mer motif
KEISVSV

SEQ ID NO: 3076 - DNA, 21 bp, synthetic construct
  misc_feature 1..21: note = n-mer motif
  source 1..21: mol_type = other DNA
aaagaaatctctgtatctgtg

SEQ ID NO: 3077 - protein, 7 aa, synthetic construct
  REGION 1..7: note = n-mer motif
LSANVRT

SEQ ID NO: 3078 - DNA, 21 bp, synthetic construct
  misc_feature 1..21: note = n-mer motif encoding polynucleotide
  source 1..21: mol_type = other DNA
ctgtcggcgaatgttcggact

SEQ ID NO: 3079 - protein, 7 aa, synthetic construct
  REGION 1..7: note = n-mer motif
KGSDNPM

SEQ ID NO: 3080 - DNA, 21 bp, synthetic construct
  misc_feature 1..21: note = n-mer motif encoding polynucleotide
  source 1..21: mol_type = other DNA
aagggttctgataatcctatg

SEQ ID NO: 3081 - protein, 7 aa, synthetic construct
  REGION 1..7: note = n-mer motif
GAPSGSL

SEQ ID NO: 3082 - DNA, 21 bp, synthetic construct
  misc_feature 1..21: note = n-mer motif encoding polynucleotide
  source 1..21: mol_type = other DNA
ggagctccgtcaggatccctt

SEQ ID NO: 3083 - protein, 7 aa, synthetic construct
  REGION 1..7: note = n-mer motif
TSGNAGL

SEQ ID NO: 3084 - DNA, 21 bp, synthetic construct
  misc_feature 1..21: note = n-mer motif
  source 1..21: mol_type = other DNA
acaagcgggaacgcgggcctc

SEQ ID NO: 3085 - protein, 7 aa, synthetic construct
  REGION 1..7: note = n-mer motif
REQQKLW

SEQ ID NO: 3086 - DNA, 21 bp, synthetic construct
  misc_feature 1..21: note = n-mer motif
  source 1..21: mol_type = other DNA
agggaacaacaaaaattatgg

SEQ ID NO: 3087 - protein, 7 aa, synthetic construct
  REGION 1..7: note = n-mer motif
NVTGVVL

SEQ ID NO: 3088 - DNA, 21 bp, synthetic construct
  misc_feature 1..21: note = n-mer motif encoding polynucleotide
  source 1..21: mol_type = other DNA
aacgtaactggagttgtcctt

SEQ ID NO: 3089 - protein, 7 aa, synthetic construct
  REGION 1..7: note = n-mer motif
MESVTQG

SEQ ID NO: 3090 - DNA, 21 bp, synthetic construct
  misc_feature 1..21: note = n-mer motif encoding polynucleotide
  source 1..21: mol_type = other DNA
atggaaagcgtaacccaagga

SEQ ID NO: 3091 - protein, 7 aa, synthetic construct
  REGION 1..7: note = n-mer motif
TTVKVSP

SEQ ID NO: 3092 - DNA, 21 bp, synthetic construct
  misc_feature 1..21: note = n-mer motif encoding polynucleotide
  source 1..21: mol_type = other DNA
acgactgtgaaggttagtcct

SEQ ID NO: 3093 - protein, 7 aa, synthetic construct
  REGION 1..7: note = n-mer motif
GLPDTMA

SEQ ID NO: 3094 - DNA, 21 bp, synthetic construct
  misc_feature 1..21: note = n-mer motif encoding polynucleotide
  source 1..21: mol_type = other DNA
ggtctgccagacacgatggcc

SEQ ID NO: 3095 - protein, 7 aa, synthetic construct
  REGION 1..7: note = n-mer motif
QSQTADA

SEQ ID NO: 3096 - DNA, 21 bp, synthetic construct
  misc_feature 1..21: note = n-mer motif encoding polynucleotide
  source 1..21: mol_type = other DNA
cagtctcagacggctgatgct

SEQ ID NO: 3097 - protein, 7 aa, synthetic construct
  REGION 1..7: note = n-mer motif
TLTLSMR

SEQ ID NO: 3098 - DNA, 21 bp, synthetic construct
  misc_feature 1..21: note = n-mer motif encoding polynucleotide
  source 1..21: mol_type = other DNA
acacttacgctttcaatgagg

SEQ ID NO: 3099 - protein, 7 aa, synthetic construct
  REGION 1..7: note = n-mer motif
GNPGSHS

SEQ ID NO: 3100 - DNA, 21 bp, synthetic construct
  misc_feature 1..21: note = n-mer motif encoding polynucleotide
  source 1..21: mol_type = other DNA
gggaatccgggttctcatagt

SEQ ID NO: 3101 - protein, 7 aa, synthetic construct
  REGION 1..7: note = n-mer motif
SGNQPRM

SEQ ID NO: 3102 - DNA, 21 bp, synthetic construct
  misc_feature 1..21: note = n-mer motif encoding polynucleotide
  source 1..21: mol_type = other DNA
tctgggaatcagcctaggatg

SEQ ID NO: 3103 - protein, 7 aa, synthetic construct
  REGION 1..7: note = n-mer motif
SHGSDLK

SEQ ID NO: 3104 - DNA, 21 bp, synthetic construct
  misc_feature 1..21: note = n-mer motif encoding polynucleotide
  source 1..21: mol_type = other DNA
tctcatggttctgatttgaag

SEQ ID NO: 3105 - protein, 7 aa, synthetic construct
  REGION 1..7: note = n-mer motif
SLGEGRH

SEQ ID NO: 3106 - DNA, 21 bp, synthetic construct
  misc_feature 1..21: note = n-mer motif encoding polynucleotide
  source 1..21: mol_type = other DNA
tcgttgggtgagggtcggcat

SEQ ID NO: 3107 - protein, 7 aa, synthetic construct
  REGION 1..7: note = n-mer motif
AGISSQP

SEQ ID NO: 3108 - DNA, 21 bp, synthetic construct
  misc_feature 1..21: note = n-mer motif encoding polynucleotide
  source 1..21: mol_type = other DNA
gctggcatcagctcacaacca

SEQ ID NO: 3109 - protein, 7 aa, synthetic construct
  REGION 1..7: note = n-mer motif
SLGEARP

SEQ ID NO: 3110 - DNA, 21 bp, synthetic construct
  misc_feature 1..21: note = n-mer motif encoding polynucleotide
  source 1..21: mol_type = other DNA
tctttaggggaagcgcgtccc

SEQ ID NO: 3111 - protein, 7 aa, synthetic construct
  REGION 1..7: note = n-mer motif
IYSDGSS

SEQ ID NO: 3112 - DNA, 21 bp, synthetic construct
  misc_feature 1..21: note = n-mer motif encoding polynucleotide
  source 1..21: mol_type = other DNA
atttatagtgatgggtcgtct

SEQ ID NO: 3113 - protein, 7 aa, synthetic construct
  REGION 1..7: note = n-mer motif
RVSLAVK

SEQ ID NO: 3114 - DNA, 21 bp, synthetic construct
  misc_feature 1..21: note = n-mer motif encoding polynucleotide
  source 1..21: mol_type = other DNA
agggtgtcgctggctgtgaag

SEQ ID NO: 3115 - protein, 7 aa, synthetic construct
  REGION 1..7: note = n-mer motif
HGTGNTY

SEQ ID NO: 3116 - DNA, 21 bp, synthetic construct
  misc_feature 1..21: note = n-mer motif encoding polynucleotide
  source 1..21: mol_type = other DNA
cacggaaccggtaacacatac

SEQ ID NO: 3117 - protein, 7 aa, synthetic construct
  REGION 1..7: note = n-mer motif
TSERGSL

SEQ ID NO: 3118 - DNA, 21 bp, synthetic construct
  misc_feature 1..21: note = n-mer motif encoding polynucleotide
  source 1..21: mol_type = other DNA
acgagtgagagggggtcgctg

SEQ ID NO: 3119 - protein, 7 aa, synthetic construct
  REGION 1..7: note = n-mer motif
ASPQVSL

SEQ ID NO: 3120 - DNA, 21 bp, synthetic construct
  misc_feature 1..21: note = n-mer motif encoding polynucleotide
  source 1..21: mol_type = other DNA
gcgagtccgcaggtgtcgctt

SEQ ID NO: 3121 - protein, 7 aa, synthetic construct
  REGION 1..7: note = n-mer motif
VVQDPGR

SEQ ID NO: 3122 - DNA, 21 bp, synthetic construct
  misc_feature 1..21: note = n-mer motif encoding polynucleotide
  source 1..21: mol_type = other DNA
gttgttcaggatcctgggcgt

SEQ ID NO: 3123 - protein, 7 aa, synthetic construct
  REGION 1..7: note = n-mer motif
QGGDSGG

SEQ ID NO: 3124 - DNA, 21 bp, synthetic construct
  misc_feature 1..21: note = n-mer motif encoding polynucleotide
  source 1..21: mol_type = other DNA
cagggtggtgatagtgggggt

SEQ ID NO: 3125 - protein, 7 aa, synthetic construct
  REGION 1..7: note = n-mer motif
TADARAL

SEQ ID NO: 3126 - DNA, 21 bp, synthetic construct
  misc_feature 1..21: note = n-mer motif encoding polynucleotide
  source 1..21: mol_type = other DNA
acagcggacgcgcgcgctttg

SEQ ID NO: 3127 - protein, 7 aa, synthetic construct
  REGION 1..7: note = n-mer motif
TNGHSQV

SEQ ID NO: 3128 - DNA, 21 bp, synthetic construct
  misc_feature 1..21: note = n-mer motif encoding polynucleotide
  source 1..21: mol_type = other DNA
actaacggacacagccaagtc

SEQ ID NO: 3129 - protein, 7 aa, synthetic construct
  REGION 1..7: note = n-mer motif
RNQAEEM

SEQ ID NO: 3130 - DNA, 21 bp, synthetic construct
  misc_feature 1..21: note = n-mer motif encoding polynucleotide
  source 1..21: mol_type = other DNA
cgtaaccaagccgaagaaatg

SEQ ID NO: 3131 - protein, 7 aa, synthetic construct
  REGION 1..7: note = n-mer motif
VAVSSNK

SEQ ID NO: 3132 - DNA, 21 bp, synthetic construct
  misc_feature 1..21: note = n-mer motif encoding polynucleotide
  source 1..21: mol_type = other DNA
gttgctgtttcttcgaataag

SEQ ID NO: 3133 - protein, 7 aa, synthetic construct
  REGION 1..7: note = n-mer motif
KTAQVQP

SEQ ID NO: 3134 - DNA, 21 bp, synthetic construct
  misc_feature 1..21: note = n-mer motif encoding polynucleotide
  source 1..21: mol_type = other DNA
aaaaccgctcaagtccaacct

SEQ ID NO: 3135 - protein, 7 aa, synthetic construct
  REGION 1..7: note = n-mer motif
AVGSDGV

SEQ ID NO: 3136 - DNA, 21 bp, synthetic construct
  misc_feature 1..21: note = n-mer motif encoding polynucleotide
  source 1..21: mol_type = other DNA
gctgtgggttctgatggtgtt

SEQ ID NO: 3137 - protein, 7 aa, synthetic construct
  REGION 1..7: note = n-mer motif
LNSSTQR

SEQ ID NO: 3138 - DNA, 21 bp, synthetic construct
  misc_feature 1..21: note = n-mer motif encoding polynucleotide
  source 1..21: mol_type = other DNA
ttgaattctagtacgcagcgt

SEQ ID NO: 3139 - protein, 7 aa, synthetic construct
  REGION 1..7: note = n-mer motif
QMKSRSD

SEQ ID NO: 3140 - DNA, 21 bp, synthetic construct
  misc_feature 1..21: note = n-mer motif encoding polynucleotide
  source 1..21: mol_type = other DNA
cagatgaagtctcgttctgat

SEQ ID NO: 3141 - protein, 7 aa, synthetic construct
  REGION 1..7: note = n-mer motif
SVQITGL

SEQ ID NO: 3142 - DNA, 21 bp, synthetic construct
  misc_feature 1..21: note = n-mer motif encoding polynucleotide
  source 1..21: mol_type = other DNA
tctgtgcagattactggtttg

SEQ ID NO: 3143 - protein, 7 aa, synthetic construct
  REGION 1..7: note = n-mer motif
STLQGVA

SEQ ID NO: 3144 - DNA, 21 bp, synthetic construct
  misc_feature 1..21: note = n-mer motif encoding polynucleotide
  source 1..21: mol_type = other DNA
agtacgctgcagggtgtggct

SEQ ID NO: 3145 - protein, 7 aa, synthetic construct
  REGION 1..7: note = n-mer motif
KLAEGVR

SEQ ID NO: 3146 - DNA, 21 bp, synthetic construct
  misc_feature 1..21: note = n-mer motif encoding polynucleotide
  source 1..21: mol_type = other DNA
aagcttgctgagggggttagg

SEQ ID NO: 3147 - protein, 7 aa, synthetic construct
  REGION 1..7: note = n-mer motif
TDKQNAF

SEQ ID NO: 3148 - DNA, 21 bp, synthetic construct
  misc_feature 1..21: note = n-mer motif encoding polynucleotide
  source 1..21: mol_type = other DNA
acagacaaacaaaacgccttc

SEQ ID NO: 3149 - protein, 7 aa, synthetic construct
  REGION 1..7: note = n-mer motif
REIRVSV

SEQ ID NO: 3150 - DNA, 21 bp, synthetic construct
  misc_feature 1..21: note = n-mer motif encoding polynucleotide
  source 1..21: mol_type = other DNA
cgagaaatcagagtatccgtc

SEQ ID NO: 3151 - protein, 7 aa, synthetic construct
  REGION 1..7: note = n-mer motif
QVRDAKT

SEQ ID NO: 3152 - DNA, 21 bp, synthetic construct
  misc_feature 1..21: note = n-mer motif encoding polynucleotide
  source 1..21: mol_type = other DNA
caggtgcgtgatgctaagact

SEQ ID NO: 3153 - protein, 7 aa, synthetic construct
  REGION 1..7: note = n-mer motif
VEGPTTN

SEQ ID NO: 3154 - DNA, 21 bp, synthetic construct
  misc_feature 1..21: note = n-mer motif encoding polynucleotide
  source 1..21: mol_type = other DNA
gtcgaagggcctacaacgaac

SEQ ID NO: 3155 - protein, 7 aa, synthetic construct
  REGION 1..7: note = n-mer motif
SDRTAVV

SEQ ID NO: 3156 - DNA, 21 bp, synthetic construct
  misc_feature 1..21: note = n-mer motif encoding polynucleotide
  source 1..21: mol_type = other DNA
agtgatcggacggcggttgtt

SEQ ID NO: 3157 - protein, 7 aa, synthetic construct
  REGION 1..7: note = n-mer motif
QSDNHGR

SEQ ID NO: 3158 - DNA, 21 bp, synthetic construct
  misc_feature 1..21: note = n-mer motif encoding polynucleotide
  source 1..21: mol_type = other DNA
cagtcggataatcatggtagg

SEQ ID NO: 3159 - protein, 7 aa, synthetic construct
  REGION 1..7: note = n-mer motif
ETQGRQF

SEQ ID NO: 3160 - DNA, 21 bp, synthetic construct
  misc_feature 1..21: note = n-mer motif encoding polynucleotide
  source 1..21: mol_type = other DNA
gagactcagggtcgtcagttt

SEQ ID NO: 3161 - protein, 7 aa, synthetic construct
  REGION 1..7: note = n-mer motif
PSVSTLS

SEQ ID NO: 3162 - DNA, 21 bp, synthetic construct
  misc_feature 1..21: note = n-mer motif encoding polynucleotide
  source 1..21: mol_type = other DNA
ccgtcggtcagcacactgtcg

SEQ ID NO: 3163 - protein, 7 aa, synthetic construct
  REGION 1..7: note = n-mer motif
RGQSDPA

SEQ ID NO: 3164 - DNA, 21 bp, synthetic construct
  misc_feature 1..21: note = n-mer motif encoding polynucleotide
  source 1..21: mol_type = other DNA
cgggggcagtctgatccggcg

SEQ ID NO: 3165 - protein, 7 aa, synthetic construct
  REGION 1..7: note = n-mer motif
AKESGLM

SEQ ID NO: 3166 - DNA, 21 bp, synthetic construct
  misc_feature 1..21: note = n-mer motif encoding polynucleotide
  source 1..21: mol_type = other DNA
gcaaaagaatccggcctaatg

SEQ ID NO: 3167 - protein, 7 aa, synthetic construct
  REGION 1..7: note = n-mer motif
AEGRSAM

SEQ ID NO: 3168 - DNA, 21 bp, synthetic construct
  misc_feature 1..21: note = n-mer motif encoding polynucleotide
  source 1..21: mol_type = other DNA
gcggaggggaggagtgctatg

SEQ ID NO: 3169 - protein, 7 aa, synthetic construct
  REGION 1..7: note = n-mer motif
RLNEHVA

SEQ ID NO: 3170 - DNA, 21 bp, synthetic construct
  misc_feature 1..21: note = n-mer motif encoding polynucleotide
  source 1..21: mol_type = other DNA
cggttgaacgaacacgttgcc

SEQ ID NO: 3171 - protein, 7 aa, synthetic construct
  REGION 1..7: note = n-mer motif
TGASTFV

SEQ ID NO: 3172 - DNA, 21 bp, synthetic construct
  misc_feature 1..21: note = n-mer motif encoding polynucleotide
  source 1..21: mol_type = other DNA
accggagccagtacattcgta

SEQ ID NO: 3173 - protein, 7 aa, synthetic construct
  REGION 1..7: note = n-mer motif
ALIRDNV

SEQ ID NO: 3174 - DNA, 21 bp, synthetic construct
  misc_feature 1..21: note = n-mer motif encoding polynucleotide
  source 1..21: mol_type = other DNA
gctctgattcgtgataatgtt

SEQ ID NO: 3175 - protein, 7 aa, synthetic construct
  REGION 1..7: note = n-mer motif
PHAATPG

SEQ ID NO: 3176 - DNA, 21 bp, synthetic construct
  misc_feature 1..21: note = n-mer motif encoding polynucleotide
  source 1..21: mol_type = other DNA
cctcatgctgcgactcctggg

SEQ ID NO: 3177 - protein, 7 aa, synthetic construct
  REGION 1..7: note = n-mer motif
RSAGTSS

SEQ ID NO: 3178 - DNA, 21 bp, synthetic construct
  misc_feature 1..21: note = n-mer motif encoding polynucleotide
  source 1..21: mol_type = other DNA
cgttcggcgggtacttcgtcg

SEQ ID NO: 3179 - protein, 7 aa, synthetic construct
  REGION 1..7: note = n-mer motif
SKAEGPV

SEQ ID NO: 3180 - DNA, 21 bp, synthetic construct
  misc_feature 1..21: note = n-mer motif encoding polynucleotide
  source 1..21: mol_type = other DNA
tcgaaggctgagggtccggtt

SEQ ID NO: 3181 - protein, 7 aa, synthetic construct
  REGION 1..7: note = n-mer motif
LSLRDGV

SEQ ID NO: 3182 - DNA, 21 bp, synthetic construct
  misc_feature 1..21: note = n-mer motif encoding polynucleotide
  source 1..21: mol_type = other DNA
ctctcgctccgggacggagtc

SEQ ID NO: 3183 - protein, 7 aa, synthetic construct
  REGION 1..7: note = n-mer motif
TVSEQPR

SEQ ID NO: 3184 - DNA, 21 bp, synthetic construct
  misc_feature 1..21: note = n-mer motif encoding polynucleotide
  source 1..21: mol_type = other DNA
acggtttcggagcagccgcgt

SEQ ID NO: 3185 - protein, 7 aa, synthetic construct
  REGION 1..7: note = n-mer motif
LSLGSQL

SEQ ID NO: 3186 - DNA, 21 bp, synthetic construct
  misc_feature 1..21: note = n-mer motif encoding polynucleotide
  source 1..21: mol_type = other DNA
ctgtctctggggtcgcagctg

SEQ ID NO: 3187 - protein, 7 aa, synthetic construct
  REGION 1..7: note = n-mer motif
NGTAGDR

SEQ ID NO: 3188 - DNA, 21 bp, synthetic construct
  misc_feature 1..21: note = n-mer motif encoding polynucleotide
  source 1..21: mol_type = other DNA
aacggaaccgcaggggaccgc

SEQ ID NO: 3189 - protein, 7 aa, synthetic construct
  REGION 1..7: note = n-mer motif
VQVSSVA

SEQ ID NO: 3190 - DNA, 21 bp, synthetic construct
  misc_feature 1..21: note = n-mer motif encoding polynucleotide
  source 1..21: mol_type = other DNA
gttcaggtttcttctgtggct

SEQ ID NO: 3191 - protein, 7 aa, synthetic construct
  REGION 1..7: note = n-mer motif
SDGKTHP

SEQ ID NO: 3192 - DNA, 21 bp, synthetic construct
  misc_feature 1..21: note = n-mer motif encoding polynucleotide
  source 1..21: mol_type = other DNA
tcggatggtaagactcatccg

SEQ ID NO: 3193 - protein, 7 aa, synthetic construct
  REGION 1..7: note = n-mer motif
NEPSVNT

SEQ ID NO: 3194 - DNA, 21 bp, synthetic construct
  misc_feature 1..21: note = n-mer motif encoding polynucleotide
  source 1..21: mol_type = other DNA
aacgaaccctcggtaaacacg

SEQ ID NO: 3195 - protein, 7 aa, synthetic construct
  REGION 1..7: note = n-mer motif
DVADSKR

SEQ ID NO: 3196 - DNA, 21 bp, synthetic construct
  misc_feature 1..21: note = n-mer motif encoding polynucleotide
  source 1..21: mol_type = other DNA
gatgttgctgattctaagcgt

SEQ ID NO: 3197 - protein, 7 aa, synthetic construct
  REGION 1..7: note = n-mer motif
GVAGTYS

SEQ ID NO: 3198 - DNA, 21 bp, synthetic construct
  misc_feature 1..21: note = n-mer motif encoding polynucleotide
  source 1..21: mol_type = other DNA
ggcgtcgcaggtacctacagt

SEQ ID NO: 3199 - protein, 7 aa, synthetic construct
  REGION 1..7: note = n-mer motif
NIKDVNR

SEQ ID NO: 3200 - DNA, 21 bp, synthetic construct
  misc_feature 1..21: note = n-mer motif encoding polynucleotide
  source 1..21: mol_type = other DNA
aatattaaggatgttaatagg

SEQ ID NO: 3201 - protein, 7 aa, synthetic construct
  REGION 1..7: note = n-mer motif
DLVLLHR

SEQ ID NO: 3202 - DNA, 21 bp, synthetic construct
  misc_feature 1..21: note = n-mer motif encoding polynucleotide
  source 1..21: mol_type = other DNA
gatcttgttttgttgcatagg

SEQ ID NO: 3203 - protein, 7 aa, synthetic construct
  REGION 1..7: note = n-mer motif
SNGTVTI

SEQ ID NO: 3204 - DNA, 21 bp, synthetic construct
  misc_feature 1..21: note = n-mer motif encoding polynucleotide
  source 1..21: mol_type = other DNA
tcaaacgggactgtaacaata

SEQ ID NO: 3205 - protein, 7 aa, synthetic construct
  REGION 1..7: note = n-mer motif
LANTLSV

SEQ ID NO: 3206 - DNA, 21 bp, synthetic construct
  misc_feature 1..21: note = n-mer motif encoding polynucleotide
  source 1..21: mol_type = other DNA
ctggctaatacgttgagtgtt

SEQ ID NO: 3207 - protein, 7 aa, synthetic construct
  REGION 1..7: note = n-mer motif
PTQVTLR

SEQ ID NO: 3208 - DNA, 21 bp, synthetic construct
  misc_feature 1..21: note = n-mer motif encoding polynucleotide
  source 1..21: mol_type = other DNA
cctactcaggtgacgcttcgg

SEQ ID NO: 3209 - protein, 7 aa, synthetic construct
  REGION 1..7: note = n-mer motif
ILGGLAV

SEQ ID NO: 3210 - DNA, 21 bp, synthetic construct
  misc_feature 1..21: note = n-mer motif encoding polynucleotide
  source 1..21: mol_type = other DNA
atattgggcggcctagccgtg

SEQ ID NO: 3211 - protein, 7 aa, synthetic construct
  REGION 1..7: note = n-mer motif
TAVHSAS

SEQ ID NO: 3212 - DNA, 21 bp, synthetic construct
  misc_feature 1..21: note = n-mer motif encoding polynucleotide
  source 1..21: mol_type = other DNA
acggctgtgcattcggcttcg

SEQ ID NO: 3213 - protein, 7 aa, synthetic construct
  REGION 1..7: note = n-mer motif
TSLSQDR

SEQ ID NO: 3214 - DNA, 21 bp, synthetic construct
  misc_feature 1..21: note = n-mer motif encoding polynucleotide
  source 1..21: mol_type = other DNA
acgagtttgtcgcaggatagg

SEQ ID NO: 3215 - protein, 7 aa, synthetic construct
  REGION 1..7: note = n-mer motif
LDTTARL

SEQ ID NO: 3216 - DNA, 21 bp, synthetic construct
  misc_feature 1..21: note = n-mer motif encoding polynucleotide
  source 1..21: mol_type = other DNA
cttgatactactgctcgtctt

SEQ ID NO: 3217 - protein, 7 aa, synthetic construct
  REGION 1..7: note = n-mer motif
GASDQLS

SEQ ID NO: 3218 - DNA, 21 bp, synthetic construct
  misc_feature 1..21: note = n-mer motif encoding polynucleotide
  source 1..21: mol_type = other DNA
ggtgcttcggatcagctttct

SEQ ID NO: 3219 - protein, 7 aa, synthetic construct
  REGION 1..7: note = n-mer motif
EKVAPTP

SEQ ID NO: 3220 - DNA, 21 bp, synthetic construct
  misc_feature 1..21: note = n-mer motif encoding polynucleotide
  source 1..21: mol_type = other DNA
gagaaggttgctccgacgcct

SEQ ID NO: 3221 - protein, 7 aa, synthetic construct
  REGION 1..7: note = n-mer motif
AAGGQVL

SEQ ID NO: 3222 - DNA, 21 bp, synthetic construct
  misc_feature 1..21: note = n-mer motif encoding polynucleotide
  source 1..21: mol_type = other DNA
gcggcgggtgggcaggttctg

SEQ ID NO: 3223 - protein, 7 aa, synthetic construct
  REGION 1..7: note = n-mer motif
PGDRSPS

SEQ ID NO: 3224 - DNA, 21 bp, synthetic construct
  misc_feature 1..21: note = n-mer motif encoding polynucleotide
  source 1..21: mol_type = other DNA
ccgggtgatcgttcgccttct

SEQ ID NO: 3225 - protein, 7 aa, synthetic construct
  REGION 1..7: note = n-mer motif
DALSRMA

SEQ ID NO: 3226 - DNA, 21 bp, synthetic construct
  misc_feature 1..21: note = n-mer motif encoding polynucleotide
  source 1..21: mol_type = other DNA
gacgcattgtcacgtatggct

SEQ ID NO: 3227 - protein, 7 aa, synthetic construct
  REGION 1..7: note = n-mer motif
TAGQVSK

SEQ ID NO: 3228 - DNA, 21 bp, synthetic construct
  misc_feature 1..21: note = n-mer motif encoding polynucleotide
  source 1..21: mol_type = other DNA
actgcgggtcaggtgtctaag

SEQ ID NO: 3229 - protein, 7 aa, synthetic construct
  REGION 1..7: note = n-mer motif
LAKDSGG

SEQ ID NO: 3230 - DNA, 21 bp, synthetic construct
  misc_feature 1..21: note = n-mer motif encoding polynucleotide
  source 1..21: mol_type = other DNA
ttggctaaggattctgggggg

SEQ ID NO: 3231 - protein, 7 aa, synthetic construct
  REGION 1..7: note = n-mer motif
SAGRADL

SEQ ID NO: 3232 - DNA, 21 bp, synthetic construct
  misc_feature 1..21: note = n-mer motif encoding polynucleotide
  source 1..21: mol_type = other DNA
agtgcaggtagagccgacctc

SEQ ID NO: 3233 - protein, 7 aa, synthetic construct
  REGION 1..7: note = n-mer motif
TTAAIVS

SEQ ID NO: 3234 - DNA, 21 bp, synthetic construct
  misc_feature 1..21: note = n-mer motif encoding polynucleotide
  source 1..21: mol_type = other DNA
acaacagctgcgatagtatcc

SEQ ID NO: 3235 - protein, 7 aa, synthetic construct
  REGION 1..7: note = n-mer motif
SMGQKEL

SEQ ID NO: 3236 - DNA, 21 bp, synthetic construct
  misc_feature 1..21: note = n-mer motif encoding polynucleotide
  source 1..21: mol_type = other DNA
agcatgggccaaaaagaacta

SEQ ID NO: 3237 - protein, 7 aa, synthetic construct
  REGION 1..7: note = n-mer motif
PQKGGGV

SEQ ID NO: 3238 - DNA, 21 bp, synthetic construct
  misc_feature 1..21: note = n-mer motif encoding polynucleotide
  source 1..21: mol_type = other DNA
cctcagaagggtggtggggtg

SEQ ID NO: 3239 - protein, 7 aa, synthetic construct
  REGION 1..7: note = n-mer motif
GAVSSIK

SEQ ID NO: 3240 - DNA, 21 bp, synthetic construct
  misc_feature 1..21: note = n-mer motif encoding polynucleotide
  source 1..21: mol_type = other DNA
ggggccgtgagtagtatcaaa

SEQ ID NO: 3241 - protein, 7 aa, synthetic construct
  REGION 1..7: note = n-mer motif
LSSGVSK

SEQ ID NO: 3242 - DNA, 21 bp, synthetic construct
  misc_feature 1..21: note = n-mer motif encoding polynucleotide
  source 1..21: mol_type = other DNA
ctctcatcgggtgtatccaaa

SEQ ID NO: 3243 - protein, 7 aa, synthetic construct
  REGION 1..7: note = n-mer motif
SVGLTNG

SEQ ID NO: 3244 - DNA, 21 bp, synthetic construct
  misc_feature 1..21: note = n-mer motif encoding polynucleotide
  source 1..21: mol_type = other DNA
agtgtgggtctgacgaatggt

SEQ ID NO: 3245 - protein, 7 aa, synthetic construct
  REGION 1..7: note = n-mer motif
VKQTDVA

SEQ ID NO: 3246 - DNA, 21 bp, synthetic construct
  misc_feature 1..21: note = n-mer motif encoding polynucleotide
  source 1..21: mol_type = other DNA
gttaagcagacggatgttgct

SEQ ID NO: 3247 - protein, 7 aa, synthetic construct
  REGION 1..7: note = n-mer motif
EAVRLSA

SEQ ID NO: 3248 - DNA, 21 bp, synthetic construct
  misc_feature 1..21: note = n-mer motif encoding polynucleotide
  source 1..21: mol_type = other DNA
gaagccgtacggctgtccgca

SEQ ID NO: 3249 - protein, 7 aa, synthetic construct
  REGION 1..7: note = n-mer motif
GTLTSGY

SEQ ID NO: 3250 - DNA, 21 bp, synthetic construct
  misc_feature 1..21: note = n-mer motif encoding polynucleotide
  source 1..21: mol_type = other DNA
ggcacactcacgagcggatac

SEQ ID NO: 3251 - protein, 7 aa, synthetic construct
  REGION 1..7: note = n-mer motif
KASDTPK

SEQ ID NO: 3252 - DNA, 21 bp, synthetic construct
  misc_feature 1..21: note = n-mer motif encoding polynucleotide
  source 1..21: mol_type = other DNA
aaggcttctgatactcctaag

SEQ ID NO: 3253 - protein, 7 aa, synthetic construct
  REGION 1..7: note = n-mer motif
RGGVTGE

SEQ ID NO: 3254 - DNA, 21 bp, synthetic construct
  misc_feature 1..21: note = n-mer motif encoding polynucleotide
  source 1..21: mol_type = other DNA
cgtggtggcgtgacaggagaa

SEQ ID NO: 3255 - protein, 7 aa, synthetic construct
  REGION 1..7: note = n-mer motif
AVLAGYR

SEQ ID NO: 3256 - DNA, 21 bp, synthetic construct
  misc_feature 1..21: note = n-mer motif encoding polynucleotide
  source 1..21: mol_type = other DNA
gcagtccttgcaggctaccgt

SEQ ID NO: 3257 - protein, 7 aa, synthetic construct
  REGION 1..7: note = n-mer motif
GTYSTSL

SEQ ID NO: 3258 - DNA, 21 bp, synthetic construct
  misc_feature 1..21: note = n-mer motif encoding polynucleotide
  source 1..21: mol_type = other DNA
ggtacgtacagcaccagcctc

SEQ ID NO: 3259 - protein, 7 aa, synthetic construct
  REGION 1..7: note = n-mer motif
TSLGLVV

SEQ ID NO: 3260 - DNA, 21 bp, synthetic construct
  misc_feature 1..21: note = n-mer motif encoding polynucleotide
  source 1..21: mol_type = other DNA
acatctcttgggttggtagtt

SEQ ID NO: 3261 - protein, 7 aa, synthetic construct
  REGION 1..7: note = n-mer motif
QVRDTKI

SEQ ID NO: 3262 - DNA, 21 bp, synthetic construct
  misc_feature 1..21: note = n-mer motif encoding polynucleotide
  source 1..21: mol_type = other DNA
caggtgcgtgatactaagatt

SEQ ID NO: 3263 - protein, 7 aa, synthetic construct
  REGION 1..7: note = n-mer motif
SMGQKEL

SEQ ID NO: 3264 - DNA, 21 bp, synthetic construct
  misc_feature 1..21: note = n-mer motif encoding polynucleotide
  source 1..21: mol_type = other DNA
tctatggggcagaaggagctt

SEQ ID NO: 3265 - protein, 7 aa, synthetic construct
  REGION 1..7: note = n-mer motif
KEAPHGV

SEQ ID NO: 3266 - DNA, 21 bp, synthetic construct
  misc_feature 1..21: note = n-mer motif encoding polynucleotide
  source 1..21: mol_type = other DNA
aaagaagccccccacggtgta

SEQ ID NO: 3267 - protein, 7 aa, synthetic construct
  REGION 1..7: note = n-mer motif
KSLSENS

SEQ ID NO: 3268 - DNA, 21 bp, synthetic construct
  misc_feature 1..21: note = n-mer motif encoding polynucleotide
  source 1..21: mol_type = other DNA
aaatcattgtccgaaaacagc

SEQ ID NO: 3269 - protein, 7 aa, synthetic construct
  REGION 1..7: note = n-mer motif
SEVSKGK

SEQ ID NO: 3270 - DNA, 21 bp, synthetic construct
  misc_feature 1..21: note = n-mer motif encoding polynucleotide
  source 1..21: mol_type = other DNA
agtgaggttagtaagggtaag

SEQ ID NO: 3271 - protein, 7 aa, synthetic construct
  REGION 1..7: note = n-mer motif
RTQTDLG

SEQ ID NO: 3272 - DNA, 21 bp, synthetic construct
  misc_feature 1..21: note = n-mer motif encoding polynucleotide
  source 1..21: mol_type = other DNA
cggacgcagacggatcttggt

SEQ ID NO: 3273 - protein, 7 aa, synthetic construct
  REGION 1..7: note = n-mer motif
TTLGATA

SEQ ID NO: 3274 - DNA, 21 bp, synthetic construct
  misc_feature 1..21: note = n-mer motif encoding polynucleotide
  source 1..21: mol_type = other DNA
acgacgttgggtgctacggct

SEQ ID NO: 3275 - protein, 7 aa, synthetic construct
  REGION 1..7: note = n-mer motif
ITSGTGT

SEQ ID NO: 3276 - DNA, 21 bp, synthetic construct
  misc_feature 1..21: note = n-mer motif encoding polynucleotide
  source 1..21: mol_type = other DNA
attactagtggtacgggtact

SEQ ID NO: 3277 - protein, 7 aa, synthetic construct
  REGION 1..7: note = n-mer motif
QTQTAVR

SEQ ID NO: 3278 - DNA, 21 bp, synthetic construct
  misc_feature 1..21: note = n-mer motif encoding polynucleotide
  source 1..21: mol_type = other DNA
cagactcagacggctgttcgt

SEQ ID NO: 3279 - protein, 7 aa, synthetic construct
  REGION 1..7: note = n-mer motif
LADNHGR

SEQ ID NO: 3280 - DNA, 21 bp, synthetic construct
  misc_feature 1..21: note = n-mer motif encoding polynucleotide
  source 1..21: mol_type = other DNA
ttggctgacaaccacggccgt

SEQ ID NO: 3281 - protein, 7 aa, synthetic construct
  REGION 1..7: note = n-mer motif
NQINAGV

SEQ ID NO: 3282 - DNA, 21 bp, synthetic construct
  misc_feature 1..21: note = n-mer motif encoding polynucleotide
  source 1..21: mol_type = other DNA
aaccaaatcaacgccggcgtg

SEQ ID NO: 3283 - protein, 7 aa, synthetic construct
  REGION 1..7: note = n-mer motif
SHGSDSR

SEQ ID NO: 3284 - DNA, 21 bp, synthetic construct
  misc_feature 1..21: note = n-mer motif encoding polynucleotide
  source 1..21: mol_type = other DNA
tctcatggttctgattcgagg

SEQ ID NO: 3285 - protein, 7 aa, synthetic construct
  REGION 1..7: note = n-mer motif
SQKEVAT

SEQ ID NO: 3286 - DNA, 21 bp, synthetic construct
  misc_feature 1..21: note = n-mer motif encoding polynucleotide
  source 1..21: mol_type = other DNA
agccaaaaagaagttgccacc

SEQ ID NO: 3287 - protein, 7 aa, synthetic construct
  REGION 1..7: note = n-mer motif
KEGAVYV

SEQ ID NO: 3288 - DNA, 21 bp, synthetic construct
  misc_feature 1..21: note = n-mer motif encoding polynucleotide
  source 1..21: mol_type = other DNA
aaggagggggcggtgtatgtg

SEQ ID NO: 3289 - protein, 7 aa, synthetic construct
  REGION 1..7: note = n-mer motif
VSGSISK

SEQ ID NO: 3290 - DNA, 21 bp, synthetic construct
  misc_feature 1..21: note = n-mer motif encoding polynucleotide
  source 1..21: mol_type = other DNA
gtttcggggagtatttctaag

SEQ ID NO: 3291 - protein, 7 aa, synthetic construct
  REGION 1..7: note = n-mer motif
VSPGKLH

SEQ ID NO: 3292 - DNA, 21 bp, synthetic construct
  misc_feature 1..21: note = n-mer motif encoding polynucleotide
  source 1..21: mol_type = other DNA
gtcagtcctggcaaactccac

SEQ ID NO: 3293 - protein, 7 aa, synthetic construct
  REGION 1..7: note = n-mer motif
GETNTNI

SEQ ID NO: 3294 - DNA, 21 bp, synthetic construct
  misc_feature 1..21: note = n-mer motif encoding polynucleotide
  source 1..21: mol_type = other DNA
ggggaaacaaacaccaacatc

SEQ ID NO: 3295 - protein, 7 aa, synthetic construct
  REGION 1..7: note = n-mer motif
TYGSGPT

SEQ ID NO: 3296 - DNA, 21 bp, synthetic construct
  misc_feature 1..21: note = n-mer motif encoding polynucleotide
  source 1..21: mol_type = other DNA
acttatggttctgggcctact

SEQ ID NO: 3297 - protein, 7 aa, synthetic construct
  REGION 1..7: note = n-mer motif
SSGQLGV

SEQ ID NO: 3298 - DNA, 21 bp, synthetic construct
  misc_feature 1..21: note = n-mer motif encoding polynucleotide
  source 1..21: mol_type = other DNA
tcctccggccaattaggcgtt

SEQ ID NO: 3299 - protein, 7 aa, synthetic construct
  REGION 1..7: note = n-mer motif
WAISDGY

SEQ ID NO: 3300 - DNA, 21 bp, synthetic construct
  misc_feature 1..21: note = n-mer motif encoding polynucleotide
  source 1..21: mol_type = other DNA
tgggctatatcagacggatac

SEQ ID NO: 3301 - protein, 7 aa, synthetic construct
  REGION 1..7: note = n-mer motif
HAEGARS

SEQ ID NO: 3302 - DNA, 21 bp, synthetic construct
  misc_feature 1..21: note = n-mer motif encoding polynucleotide
  source 1..21: mol_type = other DNA
catgcggagggtgctcgtagt

SEQ ID NO: 3303 - protein, 7 aa, synthetic construct
  REGION 1..7: note = n-mer motif
SGEALRL

SEQ ID NO: 3304 - DNA, 21 bp, synthetic construct
  misc_feature 1..21: note = n-mer motif encoding polynucleotide
  source 1..21: mol_type = other DNA
tctggggaggcgcttaggctt

SEQ ID NO: 3305 - protein, 7 aa, synthetic construct
  REGION 1..7: note = n-mer motif
SMGIGAV

SEQ ID NO: 3306 - DNA, 21 bp, synthetic construct
  misc_feature 1..21: note = n-mer motif encoding polynucleotide
  source 1..21: mol_type = other DNA
tctatggggattggtgcggtt

SEQ ID NO: 3307 - protein, 7 aa, synthetic construct
  REGION 1..7: note = n-mer motif
MVKQQLT

SEQ ID NO: 3308 - DNA, 21 bp, synthetic construct
  misc_feature 1..21: note = n-mer motif encoding polynucleotide
  source 1..21: mol_type = other DNA
atggtcaaacaacaactcacc

SEQ ID NO: 3309 - protein, 7 aa, synthetic construct
  REGION 1..7: note = n-mer motif
LTSGQAV

SEQ ID NO: 3310 - DNA, 21 bp, synthetic construct
  misc_feature 1..21: note = n-mer motif encoding polynucleotide
  source 1..21: mol_type = other DNA
ttgacatctggccaagcagtc

SEQ ID NO: 3311 - protein, 7 aa, synthetic construct
  REGION 1..7: note = n-mer motif
LSLTNGV

SEQ ID NO: 3312 - DNA, 21 bp, synthetic construct
  misc_feature 1..21: note = n-mer motif encoding polynucleotide
  source 1..21: mol_type = other DNA
ttgagccttacaaacggtgtg

SEQ ID NO: 3313 - protein, 7 aa, synthetic construct
  REGION 1..7: note = n-mer motif
SGANLSI

SEQ ID NO: 3314 - DNA, 21 bp, synthetic construct
  misc_feature 1..21: note = n-mer motif encoding polynucleotide
  source 1..21: mol_type = other DNA
tcaggagcaaacctcagcatc

SEQ ID NO: 3315 - protein, 7 aa, synthetic construct
  REGION 1..7: note = n-mer motif
SHLNTTP

SEQ ID NO: 3316 - DNA, 21 bp, synthetic construct
  misc_feature 1..21: note = n-mer motif encoding polynucleotide
  source 1..21: mol_type = other DNA
tcgcatttgaatactactcct

SEQ ID NO: 3317 - protein, 7 aa, synthetic construct
  REGION 1..7: note = n-mer motif
VMSGTSH

SEQ ID NO: 3318 - DNA, 21 bp, synthetic construct
  misc_feature 1..21: note = n-mer motif encoding polynucleotide
  source 1..21: mol_type = other DNA
gtgatgtcaggcacgtctcac

SEQ ID NO: 3319 - protein, 7 aa, synthetic construct
  REGION 1..7: note = n-mer motif
REQQKIW

SEQ ID NO: 3320 - DNA, 21 bp, synthetic construct
  misc_feature 1..21: note = n-mer motif encoding polynucleotide
  source 1..21: mol_type = other DNA
cgtgagcagcagaagatttgg

SEQ ID NO: 3321 - protein, 7 aa, synthetic construct
  REGION 1..7: note = n-mer motif
DGQRLGA

SEQ ID NO: 3322 - DNA, 21 bp, synthetic construct
  misc_feature 1..21: note = n-mer motif encoding polynucleotide
  source 1..21: mol_type = other DNA
gacggccaaagattaggtgcg

SEQ ID NO: 3323 - protein, 7 aa, synthetic construct
  REGION 1..7: note = n-mer motif
VLASPGH

SEQ ID NO: 3324 - DNA, 21 bp, synthetic construct
  misc_feature 1..21: note = n-mer motif encoding polynucleotide
  source 1..21: mol_type = other DNA
gtactagcgagtccgggacac

SEQ ID NO: 3325 - protein, 7 aa, synthetic construct
  REGION 1..7: note = n-mer motif
NSKDGHR

SEQ ID NO: 3326 - DNA, 21 bp, synthetic construct
  misc_feature 1..21: note = n-mer motif encoding polynucleotide
  source 1..21: mol_type = other DNA
aactcaaaagacggacaccgt

SEQ ID NO: 3327 - protein, 7 aa, synthetic construct
  REGION 1..7: note = n-mer motif
KNGGHVL

SEQ ID NO: 3328 - DNA, 21 bp, synthetic construct
  misc_feature 1..21: note = n-mer motif encoding polynucleotide
  source 1..21: mol_type = other DNA
aaaaacggcggccacgtgttg

SEQ ID NO: 3329 - protein, 7 aa, synthetic construct
  REGION 1..7: note = n-mer motif
ALSGLAR

SEQ ID NO: 3330 - DNA, 21 bp, synthetic construct
  misc_feature 1..21: note = n-mer motif encoding polynucleotide
  source 1..21: mol_type = other DNA
gccctctcaggcttagcacgt

SEQ ID NO: 3331 - protein, 7 aa, synthetic construct
  REGION 1..7: note = n-mer motif
TSGNAGL

SEQ ID NO: 3332 - DNA, 21 bp, synthetic construct
  misc_feature 1..21: note = n-mer motif encoding polynucleotide
  source 1..21: mol_type = other DNA
acttctggtaatgctgggctt

SEQ ID NO: 3333 - protein, 7 aa, synthetic construct
  REGION 1..7: note = n-mer motif
AGSDYTV

SEQ ID NO: 3334 - DNA, 21 bp, synthetic construct
  misc_feature 1..21: note = n-mer motif encoding polynucleotide
  source 1..21: mol_type = other DNA
gctggtagtgattatactgtg

SEQ ID NO: 3335 - protein, 7 aa, synthetic construct
  REGION 1..7: note = n-mer motif
TQIETRR

SEQ ID NO: 3336 - DNA, 21 bp, synthetic construct
  misc_feature 1..21: note = n-mer motif encoding polynucleotide
  source 1..21: mol_type = other DNA
acgcagattgagacgaggcgg

SEQ ID NO: 3337 - protein, 7 aa, synthetic construct
  REGION 1..7: note = n-mer motif
LISSTQR

SEQ ID NO: 3338 - DNA, 21 bp, synthetic construct
  misc_feature 1..21: note = n-mer motif encoding polynucleotide
  source 1..21: mol_type = other DNA
ttgatttctagtacgcagcgt

SEQ ID NO: 3339 - protein, 7 aa, synthetic construct
  REGION 1..7: note = n-mer motif
KIAEGIR

SEQ ID NO: 3340 - DNA, 21 bp, synthetic construct
  misc_feature 1..21: note = n-mer motif encoding polynucleotide
  source 1..21: mol_type = other DNA
aagattgctgaggggattagg

SEQ ID NO: 3341 - protein, 7 aa, synthetic construct
  REGION 1..7: note = n-mer motif
PSPGSQL

SEQ ID NO: 3342 - DNA, 21 bp, synthetic construct
  misc_feature 1..21: note = n-mer motif encoding polynucleotide
  source 1..21: mol_type = other DNA
ccgtctccggggtcgcagctg

SEQ ID NO: 3343 - protein, 7 aa, synthetic construct
  REGION 1..7: note = n-mer motif
RVESADL

SEQ ID NO: 3344 - DNA, 21 bp, synthetic construct
  misc_feature 1..21: note = n-mer motif encoding polynucleotide
  source 1..21: mol_type = other DNA
cgcgtagaatccgcagacctc

SEQ ID NO: 3345 - protein, 7 aa, synthetic construct
  REGION 1..7: note = n-mer motif
KGSDSPK

SEQ ID NO: 3346 - DNA, 21 bp, synthetic construct
  misc_feature 1..21: note = n-mer motif encoding polynucleotide
  source 1..21: mol_type = other DNA
aagggttctgattctcctaag

SEQ ID NO: 3347 - protein, 7 aa, synthetic construct
  REGION 1..7: note = n-mer motif
TVGHADK

SEQ ID NO: 3348 - DNA, 21 bp, synthetic construct
  misc_feature 1..21: note = n-mer motif encoding polynucleotide
  source 1..21: mol_type = other DNA
acggttgggcatgctgataag

SEQ ID NO: 3349 - protein, 7 aa, synthetic construct
  REGION 1..7: note = n-mer motif
VDRSGIP

SEQ ID NO: 3350 - DNA, 21 bp, synthetic construct
  misc_feature 1..21: note = n-mer motif encoding polynucleotide
  source 1..21: mol_type = other DNA
gtagaccgttctggaatacca

SEQ ID NO: 3351 - protein, 7 aa, synthetic construct
  REGION 1..7: note = n-mer motif
QVRDTKT

SEQ ID NO: 3352 - DNA, 21 bp, synthetic construct
  misc_feature 1..21: note = n-mer motif encoding polynucleotide
  source 1..21: mol_type = other DNA
caggtgcgtgatactaagact

SEQ ID NO: 3353 - protein, 7 aa, synthetic construct
  REGION 1..7: note = n-mer motif
RNNVETT

SEQ ID NO: 3354 - DNA, 21 bp, synthetic construct
  misc_feature 1..21: note = n-mer motif encoding polynucleotide
  source 1..21: mol_type = other DNA
cgtaacaacgtggaaacaaca

SEQ ID NO: 3355 - protein, 7 aa, synthetic construct
  REGION 1..7: note = n-mer motif
AVISMTP

SEQ ID NO: 3356 - DNA, 21 bp, synthetic construct
  misc_feature 1..21: note = n-mer motif encoding polynucleotide
  source 1..21: mol_type = other DNA
gccgtaatatctatgaccccg

SEQ ID NO: 3357 - protein, 7 aa, synthetic construct
  REGION 1..7: note = n-mer motif
ATEKAVR

SEQ ID NO: 3358 - DNA, 21 bp, synthetic construct
  misc_feature 1..21: note = n-mer motif encoding polynucleotide
  source 1..21: mol_type = other DNA
gcgacggagaaggctgtgagg

SEQ ID NO: 3359 - protein, 7 aa, synthetic construct
  REGION 1..7: note = n-mer motif
SADVTAR

SEQ ID NO: 3360 - DNA, 21 bp, synthetic construct
  misc_feature 1..21: note = n-mer motif encoding polynucleotide
  source 1..21: mol_type = other DNA
agtgctgatgtgacggcgagg

SEQ ID NO: 3361 - protein, 7 aa, synthetic construct
  REGION 1..7: note = n-mer motif
GTGGAVR

SEQ ID NO: 3362 - DNA, 21 bp, synthetic construct
  misc_feature 1..21: note = n-mer motif encoding polynucleotide
  source 1..21: mol_type = other DNA
ggaaccggcggggcagtgcgc

SEQ ID NO: 3363 - protein, 7 aa, synthetic construct
  REGION 1..7: note = n-mer motif
RTMGDST

SEQ ID NO: 3364 - DNA, 21 bp, synthetic construct
  misc_feature 1..21: note = n-mer motif encoding polynucleotide
  source 1..21: mol_type = other DNA
cgtacaatgggcgactcaacg

SEQ ID NO: 3365 - protein, 7 aa, synthetic construct
  REGION 1..7: note = n-mer motif
LGDSAKP

SEQ ID NO: 3366 - DNA, 21 bp, synthetic construct
  misc_feature 1..21: note = n-mer motif encoding polynucleotide
  source 1..21: mol_type = other DNA
ctaggcgactcagccaaacct

SEQ ID NO: 3367 - protein, 7 aa, synthetic construct
  REGION 1..7: note = n-mer motif
VTQGTSL

SEQ ID NO: 3368 - DNA, 21 bp, synthetic construct
  misc_feature 1..21: note = n-mer motif encoding polynucleotide
  source 1..21: mol_type = other DNA
gttacgcaggggacttctctg

SEQ ID NO: 3369 - protein, 7 aa, synthetic construct
  REGION 1..7: note = n-mer motif
IAVGLTV

SEQ ID NO: 3370 - DNA, 21 bp, synthetic construct
  misc_feature 1..21: note = n-mer motif encoding polynucleotide
  source 1..21: mol_type = other DNA
attgcggtggggctgactgtt

SEQ ID NO: 3371 - protein, 7 aa, synthetic construct
  REGION 1..7: note = n-mer motif
FTPGTAT

SEQ ID NO: 3372 - DNA, 21 bp, synthetic construct
  misc_feature 1..21: note = n-mer motif encoding polynucleotide
  source 1..21: mol_type = other DNA
tttactcctggtacggctact

SEQ ID NO: 3373 - protein, 7 aa, synthetic construct
  REGION 1..7: note = n-mer motif
LGDSASP

SEQ ID NO: 3374 - DNA, 21 bp, synthetic construct
  misc_feature 1..21: note = n-mer motif encoding polynucleotide
  source 1..21: mol_type = other DNA
cttggggattctgcttcgccg

SEQ ID NO: 3375 - protein, 7 aa, synthetic construct
  REGION 1..7: note = n-mer motif
VGVPTTN

SEQ ID NO: 3376 - DNA, 21 bp, synthetic construct
  misc_feature 1..21: note = n-mer motif encoding polynucleotide
  source 1..21: mol_type = other DNA
gtaggagtacccaccacgaac

SEQ ID NO: 3377 - protein, 7 aa, synthetic construct
  REGION 1..7: note = n-mer motif
LLADKRA

SEQ ID NO: 3378 - DNA, 21 bp, synthetic construct
  misc_feature 1..21: note = n-mer motif encoding polynucleotide
  source 1..21: mol_type = other DNA
cttcttgctgataagcgtgcg

SEQ ID NO: 3379 - protein, 7 aa, synthetic construct
  REGION 1..7: note = n-mer motif
TDGRGDR

SEQ ID NO: 3380 - DNA, 21 bp, synthetic construct
  misc_feature 1..21: note = n-mer motif encoding polynucleotide
  source 1..21: mol_type = other DNA
acggatggtcggggtgatagg

SEQ ID NO: 3381 - protein, 7 aa, synthetic construct
  REGION 1..7: note = n-mer motif
NLIKPFL

SEQ ID NO: 3382 - DNA, 21 bp, synthetic construct
  misc_feature 1..21: note = n-mer motif encoding polynucleotide
  source 1..21: mol_type = other DNA
aatttgattaagccttttctt

SEQ ID NO: 3383 - protein, 7 aa, synthetic construct
  REGION 1..7: note = n-mer motif
EIALTVH

SEQ ID NO: 3384 - DNA, 21 bp, synthetic construct
  misc_feature 1..21: note = n-mer motif encoding polynucleotide
  source 1..21: mol_type = other DNA
gaaatagcactgacagtacac

SEQ ID NO: 3385 - protein, 7 aa, synthetic construct
  REGION 1..7: note = n-mer motif
NSKDVQR

SEQ ID NO: 3386 - DNA, 21 bp, synthetic construct
  misc_feature 1..21: note = n-mer motif encoding polynucleotide
  source 1..21: mol_type = other DNA
aatagtaaggatgttcagagg

SEQ ID NO: 3387 - protein, 7 aa, synthetic construct
  REGION 1..7: note = n-mer motif
DLVLLHR

SEQ ID NO: 3388 - DNA, 21 bp, synthetic construct
  misc_feature 1..21: note = n-mer motif encoding polynucleotide
  source 1..21: mol_type = other DNA
gacttagtcctccttcaccga

SEQ ID NO: 3389 - protein, 7 aa, synthetic construct
  REGION 1..7: note = n-mer motif
MSVQDRG

SEQ ID NO: 3390 - DNA, 21 bp, synthetic construct
  misc_feature 1..21: note = n-mer motif encoding polynucleotide
  source 1..21: mol_type = other DNA
atgtccgttcaagaccgaggc

SEQ ID NO: 3391 - protein, 7 aa, synthetic construct
  REGION 1..7: note = n-mer motif
DRSTTVP

SEQ ID NO: 3392 - DNA, 21 bp, synthetic construct
  misc_feature 1..21: note = n-mer motif encoding polynucleotide
  source 1..21: mol_type = other DNA
gatcgtagtacgacggttcct

SEQ ID NO: 3393 - protein, 7 aa, synthetic construct
  REGION 1..7: note = n-mer motif
LSRGSQL

SEQ ID NO: 3394 - DNA, 21 bp, synthetic construct
  misc_feature 1..21: note = n-mer motif encoding polynucleotide
  source 1..21: mol_type = other DNA
ttaagtcgcggttcacaactt

SEQ ID NO: 3395 - protein, 7 aa, synthetic construct
  REGION 1..7: note = n-mer motif
THLSSTR

SEQ ID NO: 3396 - DNA, 21 bp, synthetic construct
  misc_feature 1..21: note = n-mer motif encoding polynucleotide
  source 1..21: mol_type = other DNA
acgcatctgagtagtactcgt

SEQ ID NO: 3397 - protein, 7 aa, synthetic construct
  REGION 1..7: note = n-mer motif
MNGGHAL

SEQ ID NO: 3398 - DNA, 21 bp, synthetic construct
  misc_feature 1..21: note = n-mer motif encoding polynucleotide
  source 1..21: mol_type = other DNA
atgaacggagggcacgcattg

SEQ ID NO: 3399 - protein, 7 aa, synthetic construct
  REGION 1..7: note = n-mer motif
SPSAFPI

SEQ ID NO: 3400 - DNA, 21 bp, synthetic construct
  misc_feature 1..21: note = n-mer motif encoding polynucleotide
  source 1..21: mol_type = other DNA
tcgcctagtgcattcccaatc

SEQ ID NO: 3401 - protein, 7 aa, synthetic construct
  REGION 1..7: note = n-mer motif
DYGSTGR

SEQ ID NO: 3402 - DNA, 21 bp, synthetic construct
  misc_feature 1..21: note = n-mer motif encoding polynucleotide
  source 1..21: mol_type = other DNA
gattatggttctacggggcgg

SEQ ID NO: 3403 - protein, 7 aa, synthetic construct
  REGION 1..7: note = n-mer motif
QVAQQGA

SEQ ID NO: 3404 - DNA, 21 bp, synthetic construct
  misc_feature 1..21: note = n-mer motif encoding polynucleotide
  source 1..21: mol_type = other DNA
caagtcgcacaacaaggcgct

SEQ ID NO: 3405 - protein, 7 aa, synthetic construct
  REGION 1..7: note = n-mer motif
IGSGVLA

SEQ ID NO: 3406 - DNA, 21 bp, synthetic construct
  misc_feature 1..21: note = n-mer motif encoding polynucleotide
  source 1..21: mol_type = other DNA
attggtagtggtgttcttgct

SEQ ID NO: 3407 - protein, 7 aa, synthetic construct
  REGION 1..7: note = n-mer motif
VGHGGVD

SEQ ID NO: 3408 - DNA, 21 bp, synthetic construct
  misc_feature 1..21: note = n-mer motif encoding polynucleotide
  source 1..21: mol_type = other DNA
gtgggtcatggtggtgtggat

SEQ ID NO: 3409 - protein, 7 aa, synthetic construct
  REGION 1..7: note = n-mer motif
AVGSTVK

SEQ ID NO: 3410 - DNA, 21 bp, synthetic construct
  misc_feature 1..21: note = n-mer motif encoding polynucleotide
  source 1..21: mol_type = other DNA
gcggttgggtcgacggtgaag

SEQ ID NO: 3411 - protein, 7 aa, synthetic construct
  REGION 1..7: note = n-mer motif
SGEQLRI

SEQ ID NO: 3412 - DNA, 21 bp, synthetic construct
  misc_feature 1..21: note = n-mer motif encoding polynucleotide
  source 1..21: mol_type = other DNA
tctggggagcagcttaggatt

SEQ ID NO: 3413 - protein, 7 aa, synthetic construct
  REGION 1..7: note = n-mer motif
RNNVDST

SEQ ID NO: 3414 - DNA, 21 bp, synthetic construct
  misc_feature 1..21: note = n-mer motif encoding polynucleotide
  source 1..21: mol_type = other DNA
cggaataatgttgattctacg

SEQ ID NO: 3415 - protein, 7 aa, synthetic construct
  REGION 1..7: note = n-mer motif
AVGTAIG

SEQ ID NO: 3416 - DNA, 21 bp, synthetic construct
  misc_feature 1..21: note = n-mer motif encoding polynucleotide
  source 1..21: mol_type = other DNA
gcggtaggcacggcaatcggc

SEQ ID NO: 3417 - protein, 7 aa, synthetic construct
  REGION 1..7: note = n-mer motif
VAGLGGL

SEQ ID NO: 3418 - DNA, 21 bp, synthetic construct
  misc_feature 1..21: note = n-mer motif encoding polynucleotide
  source 1..21: mol_type = other DNA
gttgcgggtttgggggggctt

SEQ ID NO: 3419 - protein, 7 aa, synthetic construct
  REGION 1..7: note = n-mer motif
RTSAGVV

SEQ ID NO: 3420 - DNA, 21 bp, synthetic construct
  misc_feature 1..21: note = n-mer motif encoding polynucleotide
  source 1..21: mol_type = other DNA
aggacgagtgcgggtgttgtg

SEQ ID NO: 3421 - protein, 7 aa, synthetic construct
  REGION 1..7: note = n-mer motif
FTSGTGN

SEQ ID NO: 3422 - DNA, 21 bp, synthetic construct
  misc_feature 1..21: note = n-mer motif encoding polynucleotide
  source 1..21: mol_type = other DNA
ttcacgagcggaacaggcaac

SEQ ID NO: 3423 - protein, 7 aa, synthetic construct
  REGION 1..7: note = n-mer motif
QREATRI

SEQ ID NO: 3424 - DNA, 21 bp, synthetic construct
  misc_feature 1..21: note = n-mer motif encoding polynucleotide
  source 1..21: mol_type = other DNA
cagcgtgaggcgacgcggatt

SEQ ID NO: 3425 - protein, 7 aa, synthetic construct
  REGION 1..7: note = n-mer motif
LNNPVQV

SEQ ID NO: 3426 - DNA, 21 bp, synthetic construct
  misc_feature 1..21: note = n-mer motif encoding polynucleotide
  source 1..21: mol_type = other DNA
ctgaataatcctgtgcaggtt

SEQ ID NO: 3427 - protein, 7 aa, synthetic construct
  REGION 1..7: note = n-mer motif
LISTTLR

SEQ ID NO: 3428 - DNA, 21 bp, synthetic construct
  misc_feature 1..21: note = n-mer motif encoding polynucleotide
  source 1..21: mol_type = other DNA
ttgatttctactacgctgcgt

SEQ ID NO: 3429 - protein, 7 aa, synthetic construct
  REGION 1..7: note = n-mer motif
GGTVSGH

SEQ ID NO: 3430 - DNA, 21 bp, synthetic construct
  misc_feature 1..21: note = n-mer motif encoding polynucleotide
  source 1..21: mol_type = other DNA
ggagggactgtatctggacac

SEQ ID NO: 3431 - protein, 7 aa, synthetic construct
  REGION 1..7: note = n-mer motif
AGTLYAR

SEQ ID NO: 3432 - DNA, 21 bp, synthetic construct
  misc_feature 1..21: note = n-mer motif encoding polynucleotide
  source 1..21: mol_type = other DNA
gcggggactctgtatgctcgt

SEQ ID NO: 3433 - protein, 7 aa, synthetic construct
  REGION 1..7: note = n-mer motif
GQSSNLH

SEQ ID NO: 3434 - DNA, 21 bp, synthetic construct
  misc_feature 1..21: note = n-mer motif encoding polynucleotide
  source 1..21: mol_type = other DNA
ggacaaagtagcaacttgcac

SEQ ID NO: 3435 - protein, 7 aa, synthetic construct
  REGION 1..7: note = n-mer motif
DVSGSVI

SEQ ID NO: 3436 - DNA, 21 bp, synthetic construct
  misc_feature 1..21: note = n-mer motif encoding polynucleotide
  source 1..21: mol_type = other DNA
gacgtaagcggctccgtaatc

SEQ ID NO: 3437 - protein, 7 aa, synthetic construct
  REGION 1..7: note = n-mer motif
KLAEGVR

SEQ ID NO: 3438 - DNA, 21 bp, synthetic construct
  misc_feature 1..21: note = n-mer motif encoding polynucleotide
  source 1..21: mol_type = other DNA
aaattggcagaaggagtcaga

SEQ ID NO: 3439 - protein, 7 aa, synthetic construct
  REGION 1..7: note = n-mer motif
SGLQVSI

SEQ ID NO: 3440 - DNA, 21 bp, synthetic construct
  misc_feature 1..21: note = n-mer motif encoding polynucleotide
  source 1..21: mol_type = other DNA
tcaggattgcaagtgtcgata

SEQ ID NO: 3441 - protein, 7 aa, synthetic construct
  REGION 1..7: note = n-mer motif
QTGAIVV

SEQ ID NO: 3442 - DNA, 21 bp, synthetic construct
  misc_feature 1..21: note = n-mer motif encoding polynucleotide
  source 1..21: mol_type = other DNA
caaacaggagcaatcgttgtc

SEQ ID NO: 3443 - protein, 7 aa, synthetic construct
  REGION 1..7: note = n-mer motif
LEANVSH

SEQ ID NO: 3444 - DNA, 21 bp, synthetic construct
  misc_feature 1..21: note = n-mer motif encoding polynucleotide
  source 1..21: mol_type = other DNA
ctggaagctaacgtgagtcac

SEQ ID NO: 3445 - protein, 7 aa, synthetic construct
  REGION 1..7: note = n-mer motif
ALSGLSK

SEQ ID NO: 3446 - DNA, 21 bp, synthetic construct
  misc_feature 1..21: note = n-mer motif encoding polynucleotide
  source 1..21: mol_type = other DNA
gctctttctggtctttctaag

SEQ ID NO: 3447 - protein, 7 aa, synthetic construct
  REGION 1..7: note = n-mer motif
MGKQTTL

SEQ ID NO: 3448 - DNA, 21 bp, synthetic construct
  misc_feature 1..21: note = n-mer motif encoding polynucleotide
  source 1..21: mol_type = other DNA
atggggaagcagactacgctg

SEQ ID NO: 3449 - protein, 7 aa, synthetic construct
  REGION 1..7: note = n-mer motif
HHSQYGA

SEQ ID NO: 3450 - DNA, 21 bp, synthetic construct
  misc_feature 1..21: note = n-mer motif encoding polynucleotide
  source 1..21: mol_type = other DNA
caccactcgcaatacggcgct

SEQ ID NO: 3451 - protein, 7 aa, synthetic construct
  REGION 1..7: note = n-mer motif
TGLQGSI

SEQ ID NO: 3452 - DNA, 21 bp, synthetic construct
  misc_feature 1..21: note = n-mer motif encoding polynucleotide
  source 1..21: mol_type = other DNA
accggccttcaaggatctata

SEQ ID NO: 3453 - protein, 7 aa, synthetic construct
  REGION 1..7: note = n-mer motif
LISGEKT

SEQ ID NO: 3454 - DNA, 21 bp, synthetic construct
  misc_feature 1..21: note = n-mer motif encoding polynucleotide
  source 1..21: mol_type = other DNA
ttgatttctggtgagaagacg

SEQ ID NO: 3455 - protein, 7 aa, synthetic construct
  REGION 1..7: note = n-mer motif
RSASGNE

SEQ ID NO: 3456 - DNA, 21 bp, synthetic construct
  misc_feature 1..21: note = n-mer motif encoding polynucleotide
  source 1..21: mol_type = other DNA
cggagtgctagtggtaatgag

SEQ ID NO: 3457 - protein, 7 aa, synthetic construct
  REGION 1..7: note = n-mer motif
SEKSVPL

SEQ ID NO: 3458 - DNA, 21 bp, synthetic construct
  misc_feature 1..21: note = n-mer motif encoding polynucleotide
  source 1..21: mol_type = other DNA
tccgaaaaaagcgtaccactg

SEQ ID NO: 3459 - protein, 7 aa, synthetic construct
  REGION 1..7: note = n-mer motif
VLDSRSP

SEQ ID NO: 3460 - DNA, 21 bp, synthetic construct
  misc_feature 1..21: note = n-mer motif encoding polynucleotide
  source 1..21: mol_type = other DNA
gttctggatagtaggagtccg

SEQ ID NO: 3461 - protein, 7 aa, synthetic construct
  REGION 1..7: note = n-mer motif
QGGNSGR

SEQ ID NO: 3462 - DNA, 21 bp, synthetic construct
  misc_feature 1..21: note = n-mer motif encoding polynucleotide
  source 1..21: mol_type = other DNA
caaggaggcaactcaggtagg

SEQ ID NO: 3463 - protein, 7 aa, synthetic construct
  REGION 1..7: note = n-mer motif
SAVASGK

SEQ ID NO: 3464 - DNA, 21 bp, synthetic construct
  misc_feature 1..21: note = n-mer motif encoding polynucleotide
  source 1..21: mol_type = other DNA
tcggcggtggcgtcgggtaag

SEQ ID NO: 3465 - protein, 7 aa, synthetic construct
  REGION 1..7: note = n-mer motif
AQGPQTG

SEQ ID NO: 3466 - DNA, 21 bp, synthetic construct
  misc_feature 1..21: note = n-mer motif encoding polynucleotide
  source 1..21: mol_type = other DNA
gcgcagggtccgcagactggt

SEQ ID NO: 3467 - protein, 7 aa, synthetic construct
  REGION 1..7: note = n-mer motif
MNVGNVL

SEQ ID NO: 3468 - DNA, 21 bp, synthetic construct
  misc_feature 1..21: note = n-mer motif encoding polynucleotide
  source 1..21: mol_type = other DNA
atgaacgttgggaacgtgctc

SEQ ID NO: 3469 - protein, 7 aa, synthetic construct
  REGION 1..7: note = n-mer motif
VLGGTGK

SEQ ID NO: 3470 - DNA, 21 bp, synthetic construct
  misc_feature 1..21: note = n-mer motif encoding polynucleotide
  source 1..21: mol_type = other DNA
gtcctcggaggtaccggtaaa

SEQ ID NO: 3471 - protein, 7 aa, synthetic construct
  REGION 1..7: note = n-mer motif
KSHSEIS

SEQ ID NO: 3472 - DNA, 21 bp, synthetic construct
  misc_feature 1..21: note = n-mer motif encoding polynucleotide
  source 1..21: mol_type = other DNA
aaatcccacagtgaaatcagc

SEQ ID NO: 3473 - protein, 7 aa, synthetic construct
  REGION 1..7: note = n-mer motif
SDSRVSY

SEQ ID NO: 3474 - DNA, 21 bp, synthetic construct
  misc_feature 1..21: note = n-mer motif encoding polynucleotide
  source 1..21: mol_type = other DNA
agtgactcccgagtatcgtac

SEQ ID NO: 3475 - protein, 7 aa, synthetic construct
  REGION 1..7: note = n-mer motif
YTAGSMA

SEQ ID NO: 3476 - DNA, 21 bp, synthetic construct
  misc_feature 1..21: note = n-mer motif encoding polynucleotide
  source 1..21: mol_type = other DNA
tatacggcggggtctatggcg

SEQ ID NO: 3477 - protein, 7 aa, synthetic construct
  REGION 1..7: note = n-mer motif
TRFDGSG

SEQ ID NO: 3478 - DNA, 21 bp, synthetic construct
  misc_feature 1..21: note = n-mer motif encoding polynucleotide
  source 1..21: mol_type = other DNA
acgcgttttgatggttcgggt

SEQ ID NO: 3479 - protein, 7 aa, synthetic construct
  REGION 1..7: note = n-mer motif
QREAERI

SEQ ID NO: 3480 - DNA, 21 bp, synthetic construct
  misc_feature 1..21: note = n-mer motif encoding polynucleotide
  source 1..21: mol_type = other DNA
cagcgtgaggcggagcggatt

SEQ ID NO: 3481 - protein, 7 aa, synthetic construct
  REGION 1..7: note = n-mer motif
KNPAVDP

SEQ ID NO: 3482 - DNA, 21 bp, synthetic construct
  misc_feature 1..21: note = n-mer motif encoding polynucleotide
  source 1..21: mol_type = other DNA
aaaaaccccgcagtcgacccg

SEQ ID NO: 3483 - protein, 7 aa, synthetic construct
  REGION 1..7: note = n-mer motif
FSSETLT

SEQ ID NO: 3484 - DNA, 21 bp, synthetic construct
  misc_feature 1..21: note = n-mer motif encoding polynucleotide
  source 1..21: mol_type = other DNA
ttcagctccgaaaccttgacc

SEQ ID NO: 3485 - protein, 7 aa, synthetic construct
  REGION 1..7: note = n-mer motif
YGNSGVI

SEQ ID NO: 3486 - DNA, 21 bp, synthetic construct
  misc_feature 1..21: note = n-mer motif encoding polynucleotide
  source 1..21: mol_type = other DNA
tacggcaactcgggggtcata

SEQ ID NO: 3487 - protein, 7 aa, synthetic construct
  REGION 1..7: note = n-mer motif
KNPGADP

SEQ ID NO: 3488 - DNA, 21 bp, synthetic construct
  misc_feature 1..21: note = n-mer motif encoding polynucleotide
  source 1..21: mol_type = other DNA
aaaaaccctggtgccgacccc

SEQ ID NO: 3489 - protein, 7 aa, synthetic construct
  REGION 1..7: note = n-mer motif
LAIAGTM

SEQ ID NO: 3490 - DNA, 21 bp, synthetic construct
  misc_feature 1..21: note = n-mer motif encoding polynucleotide
  source 1..21: mol_type = other DNA
cttgctattgcggggactatg

SEQ ID NO: 3491 - protein, 7 aa, synthetic construct
  REGION 1..7: note = n-mer motif
SNLGNTS

SEQ ID NO: 3492 - DNA, 21 bp, synthetic construct
  misc_feature 1..21: note = n-mer motif encoding polynucleotide
  source 1..21: mol_type = other DNA
tcgaatctgggtaatactagt

SEQ ID NO: 3493 - protein, 7 aa, synthetic construct
  REGION 1..7: note = n-mer motif
PIQLGQA

SEQ ID NO: 3494 - DNA, 21 bp, synthetic construct
  misc_feature 1..21: note = n-mer motif encoding polynucleotide
  source 1..21: mol_type = other DNA
ccgattcagttgggtcaggct

SEQ ID NO: 3495 - protein, 7 aa, synthetic construct
  REGION 1..7: note = n-mer motif
KTETGYE

SEQ ID NO: 3496 - DNA, 21 bp, synthetic construct
  misc_feature 1..21: note = n-mer motif encoding polynucleotide
  source 1..21: mol_type = other DNA
aagactgagactggttatgag

SEQ ID NO: 3497 - protein, 7 aa, synthetic construct
  REGION 1..7: note = n-mer motif
VTKVSHV

SEQ ID NO: 3498 - DNA, 21 bp, synthetic construct
  misc_feature 1..21: note = n-mer motif encoding polynucleotide
  source 1..21: mol_type = other DNA
gtcacaaaagtaagtcacgtc

SEQ ID NO: 3499 - protein, 7 aa, synthetic construct
  REGION 1..7: note = n-mer motif
AGGGVPR

SEQ ID NO: 3500 - DNA, 21 bp, synthetic construct
  misc_feature 1..21: note = n-mer motif encoding polynucleotide
  source 1..21: mol_type = other DNA
gcaggaggcggcgtcccacgt

SEQ ID NO: 3501 - protein, 7 aa, synthetic construct
  REGION 1..7: note = n-mer motif
ADKGGVA

SEQ ID NO: 3502 - DNA, 21 bp, synthetic construct
  misc_feature 1..21: note = n-mer motif encoding polynucleotide
  source 1..21: mol_type = other DNA
gctgataaggggggtgtggct

SEQ ID NO: 3503 - protein, 7 aa, synthetic construct
  REGION 1..7: note = n-mer motif
SEGISRY

SEQ ID NO: 3504 - DNA, 21 bp, synthetic construct
  misc_feature 1..21: note = n-mer motif encoding polynucleotide
  source 1..21: mol_type = other DNA
tcagaaggcatatctcggtac

SEQ ID NO: 3505 - protein, 7 aa, synthetic construct
  REGION 1..7: note = n-mer motif
LDHGGVD

SEQ ID NO: 3506 - DNA, 21 bp, synthetic construct
  misc_feature 1..21: note = n-mer motif encoding polynucleotide
  source 1..21: mol_type = other DNA
ctcgaccacggaggagtagac

SEQ ID NO: 3507 - protein, 7 aa, synthetic construct
  REGION 1..7: note = n-mer motif
NEQSVKT

SEQ ID NO: 3508 - DNA, 21 bp, synthetic construct
  misc_feature 1..21: note = n-mer motif encoding polynucleotide
  source 1..21: mol_type = other DNA
aacgaacaaagcgttaaaacc

SEQ ID NO: 3509 - protein, 7 aa, synthetic construct
  REGION 1..7: note = n-mer motif
SARDMTR

SEQ ID NO: 3510 - DNA, 21 bp, synthetic construct
  misc_feature 1..21: note = n-mer motif encoding polynucleotide
  source 1..21: mol_type = other DNA
agcgcccgcgacatgactcgt

SEQ ID NO: 3511 - protein, 7 aa, synthetic construct
  REGION 1..7: note = n-mer motif
TSVGMQV

SEQ ID NO: 3512 - DNA, 21 bp, synthetic construct
  misc_feature 1..21: note = n-mer motif encoding polynucleotide
  source 1..21: mol_type = other DNA
acgtcggttgggatgcaggtt

SEQ ID NO: 3513 - protein, 7 aa, synthetic construct
  REGION 1..7: note = n-mer motif
VQAGKEL

SEQ ID NO: 3514 - DNA, 21 bp, synthetic construct
  misc_feature 1..21: note = n-mer motif encoding polynucleotide
  source 1..21: mol_type = other DNA
gtgcaggctggtaaggagttg

SEQ ID NO: 3515 - protein, 7 aa, synthetic construct
  REGION 1..7: note = n-mer motif
NASAGDR

SEQ ID NO: 3516 - DNA, 21 bp, synthetic construct
  misc_feature 1..21: note = n-mer motif encoding polynucleotide
  source 1..21: mol_type = other DNA
aatgcgagtgcgggtgatcgt

SEQ ID NO: 3517 - protein, 7 aa, synthetic construct
  REGION 1..7: note = n-mer motif
AAGVILK

SEQ ID NO: 3518 - DNA, 21 bp, synthetic construct
  misc_feature 1..21: note = n-mer motif encoding polynucleotide
  source 1..21: mol_type = other DNA
gcggcgggtgttattctgaag

SEQ ID NO: 3519 - protein, 7 aa, synthetic construct
  REGION 1..7: note = n-mer motif
SGAEGGR

SEQ ID NO: 3520 - DNA, 21 bp, synthetic construct
  misc_feature 1..21: note = n-mer motif encoding polynucleotide
  source 1..21: mol_type = other DNA
tctggtgctgagggtggtcgg

SEQ ID NO: 3521 - protein, 7 aa, synthetic construct
  REGION 1..7: note = n-mer motif
NRQEHSN

SEQ ID NO: 3522 - DNA, 21 bp, synthetic construct
  misc_feature 1..21: note = n-mer motif encoding polynucleotide
  source 1..21: mol_type = other DNA
aaccgccaagaacacagcaac

SEQ ID NO: 3523 - protein, 7 aa, synthetic construct
  REGION 1..7: note = n-mer motif
AADGSVR

SEQ ID NO: 3524 - DNA, 21 bp, synthetic construct
  misc_feature 1..21: note = n-mer motif encoding polynucleotide
  source 1..21: mol_type = other DNA
gccgcagacggaagtgttagg

SEQ ID NO: 3525 - protein, 7 aa, synthetic construct
  REGION 1..7: note = n-mer motif
SGANLSM

SEQ ID NO: 3526 - DNA, 21 bp, synthetic construct
  misc_feature 1..21: note = n-mer motif encoding polynucleotide
  source 1..21: mol_type = other DNA
tctggtgcgaatttgtctatg

SEQ ID NO: 3527 - protein, 7 aa, synthetic construct
  REGION 1..7: note = n-mer motif
HSSGWTS

SEQ ID NO: 3528 - DNA, 21 bp, synthetic construct
  misc_feature 1..21: note = n-mer motif encoding polynucleotide
  source 1..21: mol_type = other DNA
cactcgagtggatggaccagc

SEQ ID NO: 3529 - protein, 7 aa, synthetic construct
  REGION 1..7: note = n-mer motif
NLGVVQP

SEQ ID NO: 3530 - DNA, 21 bp, synthetic construct
  misc_feature 1..21: note = n-mer motif encoding polynucleotide
  source 1..21: mol_type = other DNA
aatttgggtgtggttcagccg

SEQ ID NO: 3531 - protein, 7 aa, synthetic construct
  REGION 1..7: note = n-mer motif
HSTGAEK

SEQ ID NO: 3532 - DNA, 21 bp, synthetic construct
  misc_feature 1..21: note = n-mer motif encoding polynucleotide
  source 1..21: mol_type = other DNA
cattcgacgggtgcggagaag

SEQ ID NO: 3533 - protein, 7 aa, synthetic construct
  REGION 1..7: note = n-mer motif
NLSISER

SEQ ID NO: 3534 - DNA, 21 bp, synthetic construct
  misc_feature 1..21: note = n-mer motif encoding polynucleotide
  source 1..21: mol_type = other DNA
aatttgtcgatttctgagcgg

SEQ ID NO: 3535 - protein, 7 aa, synthetic construct
  REGION 1..7: note = n-mer motif
TNLADTA

SEQ ID NO: 3536 - DNA, 21 bp, synthetic construct
  misc_feature 1..21: note = n-mer motif encoding polynucleotide
  source 1..21: mol_type = other DNA
actaatctggctgatactgcg

SEQ ID NO: 3537 - protein, 7 aa, synthetic construct
  REGION 1..7: note = n-mer motif
RSSGTSA

SEQ ID NO: 3538 - DNA, 21 bp, synthetic construct
  misc_feature 1..21: note = n-mer motif encoding polynucleotide
  source 1..21: mol_type = other DNA
agatcatccgggacctcagca

SEQ ID NO: 3539 - protein, 7 aa, synthetic construct
  REGION 1..7: note = n-mer motif
KNGGHVL

SEQ ID NO: 3540 - DNA, 21 bp, synthetic construct
  misc_feature 1..21: note = n-mer motif encoding polynucleotide
  source 1..21: mol_type = other DNA
aagaatgggggtcatgttctg

SEQ ID NO: 3541 - protein, 7 aa, synthetic construct
  REGION 1..7: note = n-mer motif
GSSGGHF

SEQ ID NO: 3542 - DNA, 21 bp, synthetic construct
  misc_feature 1..21: note = n-mer motif encoding polynucleotide
  source 1..21: mol_type = other DNA
ggaagctcgggtggacacttc

SEQ ID NO: 3543 - protein, 7 aa, synthetic construct
  REGION 1..7: note = n-mer motif
ISHSESV

SEQ ID NO: 3544 - DNA, 21 bp, synthetic construct
  misc_feature 1..21: note = n-mer motif encoding polynucleotide
  source 1..21: mol_type = other DNA
attagtcattcggagagtgtg

SEQ ID NO: 3545 - protein, 7 aa, synthetic construct
  REGION 1..7: note = n-mer motif
VTGVSRV

SEQ ID NO: 3546 - DNA, 21 bp, synthetic construct
  misc_feature 1..21: note = n-mer motif encoding polynucleotide
  source 1..21: mol_type = other DNA
gttacgggtgtgagtcgtgtg

SEQ ID NO: 3547 - protein, 7 aa, synthetic construct
  REGION 1..7: note = n-mer motif
QGGNSGA

SEQ ID NO: 3548 - DNA, 21 bp, synthetic construct
  misc_feature 1..21: note = n-mer motif encoding polynucleotide
  source 1..21: mol_type = other DNA
cagggtggtaatagtggggct

SEQ ID NO: 3549 - protein, 7 aa, synthetic construct
  REGION 1..7: note = n-mer motif
AMPTSGH

SEQ ID NO: 3550 - DNA, 21 bp, synthetic construct
  misc_feature 1..21: note = n-mer motif encoding polynucleotide
  source 1..21: mol_type = other DNA
gcgatgccgacgagtgggcat

SEQ ID NO: 3551 - protein, 7 aa, synthetic construct
  REGION 1..7: note = n-mer motif
TLTNGMP

SEQ ID NO: 3552 - DNA, 21 bp, synthetic construct
  misc_feature 1..21: note = n-mer motif encoding polynucleotide
  source 1..21: mol_type = other DNA
accttgaccaacggtatgcca

SEQ ID NO: 3553 - protein, 7 aa, synthetic construct
  REGION 1..7: note = n-mer motif
SHGTDSK

SEQ ID NO: 3554 - DNA, 21 bp, synthetic construct
  misc_feature 1..21: note = n-mer motif encoding polynucleotide
  source 1..21: mol_type = other DNA
tcccacggaacggacagtaaa

SEQ ID NO: 3555 - protein, 7 aa, synthetic construct
  REGION 1..7: note = n-mer motif
WSDRESR

SEQ ID NO: 3556 - DNA, 21 bp, synthetic construct
  misc_feature 1..21: note = n-mer motif encoding polynucleotide
  source 1..21: mol_type = other DNA
tggtctgaccgcgaatctagg

SEQ ID NO: 3557 - protein, 7 aa, synthetic construct
  REGION 1..7: note = n-mer motif
KEIRVSV

SEQ ID NO: 3558 - DNA, 21 bp, synthetic construct
  misc_feature 1..21: note = n-mer motif encoding polynucleotide
  source 1..21: mol_type = other DNA
aaagaaataagggtctccgtg

SEQ ID NO: 3559 - protein, 7 aa, synthetic construct
  REGION 1..7: note = n-mer motif
FAGVTQA

SEQ ID NO: 3560 - DNA, 21 bp, synthetic construct
  misc_feature 1..21: note = n-mer motif encoding polynucleotide
  source 1..21: mol_type = other DNA
tttgcgggggttacgcaggcg

SEQ ID NO: 3561 - protein, 7 aa, synthetic construct
  REGION 1..7: note = n-mer motif
DSHVSGV

SEQ ID NO: 3562 - DNA, 21 bp, synthetic construct
  misc_feature 1..21: note = n-mer motif encoding polynucleotide
  source 1..21: mol_type = other DNA
gactctcacgtatccggagtg

SEQ ID NO: 3563 - protein, 7 aa, synthetic construct
  REGION 1..7: note = n-mer motif
LLKESTP

SEQ ID NO: 3564 - DNA, 21 bp, synthetic construct
  misc_feature 1..21: note = n-mer motif encoding polynucleotide
  source 1..21: mol_type = other DNA
ctccttaaagaaagtacacct

SEQ ID NO: 3565 - protein, 7 aa, synthetic construct
  REGION 1..7: note = n-mer motif
ADREVRY

SEQ ID NO: 3566 - DNA, 21 bp, synthetic construct
  misc_feature 1..21: note = n-mer motif encoding polynucleotide
  source 1..21: mol_type = other DNA
gcggatcgggaggtgcgttat

SEQ ID NO: 3567 - protein, 7 aa, synthetic construct
  REGION 1..7: note = n-mer motif
MNGGHGL

SEQ ID NO: 3568 - DNA, 21 bp, synthetic construct
  misc_feature 1..21: note = n-mer motif encoding polynucleotide
  source 1..21: mol_type = other DNA
atgaatgggggtcatggtctg

SEQ ID NO: 3569 - protein, 7 aa, synthetic construct
  REGION 1..7: note = n-mer motif
SLRDVEG

SEQ ID NO: 3570 - DNA, 21 bp, synthetic construct
  misc_feature 1..21: note = n-mer motif encoding polynucleotide
  source 1..21: mol_type = other DNA
tcgctgcgtgatgtggagggt

SEQ ID NO: 3571 - protein, 7 aa, synthetic construct
  REGION 1..7: note = n-mer motif
SKSGVVA

SEQ ID NO: 3572 - DNA, 21 bp, synthetic construct
  misc_feature 1..21: note = n-mer motif encoding polynucleotide
  source 1..21: mol_type = other DNA
agtaagtctggtgtggtggcg

SEQ ID NO: 3573 - protein, 7 aa, synthetic construct
  REGION 1..7: note = n-mer motif
RNEGSVP

SEQ ID NO: 3574 - DNA, 21 bp, synthetic construct
  misc_feature 1..21: note = n-mer motif encoding polynucleotide
  source 1..21: mol_type = other DNA
cgaaacgaaggctcggtccct

SEQ ID NO: 3575 - protein, 7 aa, synthetic construct
  REGION 1..7: note = n-mer motif
NLQGNAL

SEQ ID NO: 3576 - DNA, 21 bp, synthetic construct
  misc_feature 1..21: note = n-mer motif encoding polynucleotide
  source 1..21: mol_type = other DNA
aacttacaaggcaacgcgcta

SEQ ID NO: 3577 - protein, 7 aa, synthetic construct
  REGION 1..7: note = n-mer motif
YSTTAGM

SEQ ID NO: 3578 - DNA, 21 bp, synthetic construct
  misc_feature 1..21: note = n-mer motif encoding polynucleotide
  source 1..21: mol_type = other DNA
tattcgactacggctggtatg

SEQ ID NO: 3579 - protein, 7 aa, synthetic construct
  REGION 1..7: note = n-mer motif
AADGSVR

SEQ ID NO: 3580 - DNA, 21 bp, synthetic construct
  misc_feature 1..21: note = n-mer motif encoding polynucleotide
  source 1..21: mol_type = other DNA
gcggcggatggttctgtgcgg

SEQ ID NO: 3581 - protein, 7 aa, synthetic construct
  REGION 1..7: note = n-mer motif
VGNMLSV

SEQ ID NO: 3582 - DNA, 21 bp, synthetic construct
  misc_feature 1..21: note = n-mer motif encoding polynucleotide
  source 1..21: mol_type = other DNA
gtcgggaacatgctatctgtg

SEQ ID NO: 3583 - protein, 7 aa, synthetic construct
  REGION 1..7: note = n-mer motif
KEYITAV

SEQ ID NO: 3584 - DNA, 21 bp, synthetic construct
  misc_feature 1..21: note = n-mer motif encoding polynucleotide
  source 1..21: mol_type = other DNA
aaggagtatattacggctgtg

SEQ ID NO: 3585 - protein, 7 aa, synthetic construct
  REGION 1..7: note = n-mer motif
ANAGMSR

SEQ ID NO: 3586 - DNA, 21 bp, synthetic construct
  misc_feature 1..21: note = n-mer motif encoding polynucleotide
  source 1..21: mol_type = other DNA
gcgaatgctgggatgtctagg

SEQ ID NO: 3587 - protein, 7 aa, synthetic construct
  REGION 1..7: note = n-mer motif
HTVEGAL

SEQ ID NO: 3588 - DNA, 21 bp, synthetic construct
  misc_feature 1..21: note = n-mer motif encoding polynucleotide
  source 1..21: mol_type = other DNA
catacggttgagggggcgctg

SEQ ID NO: 3589 - protein, 7 aa, synthetic construct
  REGION 1..7: note = n-mer motif
NHQSLVN

SEQ ID NO: 3590 - DNA, 21 bp, synthetic construct
  misc_feature 1..21: note = n-mer motif encoding polynucleotide
  source 1..21: mol_type = other DNA
aaccaccaatcgctcgttaac

SEQ ID NO: 3591 - protein, 7 aa, synthetic construct
  REGION 1..7: note = n-mer motif
VSGTLLA

SEQ ID NO: 3592 - DNA, 21 bp, synthetic construct
  misc_feature 1..21: note = n-mer motif encoding polynucleotide
  source 1..21: mol_type = other DNA
gtatccggcacgttactggca

SEQ ID NO: 3593 - protein, 7 aa, synthetic construct
  REGION 1..7: note = n-mer motif
QSRPDAL

SEQ ID NO: 3594 - DNA, 21 bp, synthetic construct
  misc_feature 1..21: note = n-mer motif encoding polynucleotide
  source 1..21: mol_type = other DNA
cagagtcgtccggatgctctt

SEQ ID NO: 3595 - protein, 7 aa, synthetic construct
  REGION 1..7: note = n-mer motif
AGVVNGL

SEQ ID NO: 3596 - DNA, 21 bp, synthetic construct
  misc_feature 1..21: note = n-mer motif encoding polynucleotide
  source 1..21: mol_type = other DNA
gcgggggtggtgaatggtttg

SEQ ID NO: 3597 - protein, 7 aa, synthetic construct
  REGION 1..7: note = n-mer motif
RGGETSE

SEQ ID NO: 3598 - DNA, 21 bp, synthetic construct
  misc_feature 1..21: note = n-mer motif encoding polynucleotide
  source 1..21: mol_type = other DNA
cgggggggtgagacgtctgag

SEQ ID NO: 3599 - protein, 7 aa, synthetic construct
  REGION 1..7: note = n-mer motif
LSLTVGV

SEQ ID NO: 3600 - DNA, 21 bp, synthetic construct
  misc_feature 1..21: note = n-mer motif encoding polynucleotide
  source 1..21: mol_type = other DNA
ctgagtttgactgttggggtt

SEQ ID NO: 3601 - protein, 7 aa, synthetic construct
  REGION 1..7: note = n-mer motif
HISSLAM

SEQ ID NO: 3602 - DNA, 21 bp, synthetic construct
  misc_feature 1..21: note = n-mer motif encoding polynucleotide
  source 1..21: mol_type = other DNA
cacatatcctcccttgccatg

SEQ ID NO: 3603 - protein, 7 aa, synthetic construct
  REGION 1..7: note = n-mer motif
AFSGGET

SEQ ID NO: 3604 - DNA, 21 bp, synthetic construct
  misc_feature 1..21: note = n-mer motif encoding polynucleotide
  source 1..21: mol_type = other DNA
gccttcagcggtggtgaaacg

SEQ ID NO: 3605 - protein, 7 aa, synthetic construct
  REGION 1..7: note = n-mer motif
LRGTENQ

SEQ ID NO: 3606 - DNA, 21 bp, synthetic construct
  misc_feature 1..21: note = n-mer motif encoding polynucleotide
  source 1..21: mol_type = other DNA
ttgcgtgggacggagaatcag

SEQ ID NO: 3607 - protein, 7 aa, synthetic construct
  REGION 1..7: note = n-mer motif
QSQTAVD

SEQ ID NO: 3608 - DNA, 21 bp, synthetic construct
  misc_feature 1..21: note = n-mer motif encoding polynucleotide
  source 1..21: mol_type = other DNA
caatcacaaacagcagtcgac

SEQ ID NO: 3609 - protein, 7 aa, synthetic construct
  REGION 1..7: note = n-mer motif
ASSATLL

SEQ ID NO: 3610 - DNA, 21 bp, synthetic construct
  misc_feature 1..21: note = n-mer motif encoding polynucleotide
  source 1..21: mol_type = other DNA
gcgtctagtgctactttgttg

SEQ ID NO: 3611 - protein, 7 aa, synthetic construct
  REGION 1..7: note = n-mer motif
GQALVSS

SEQ ID NO: 3612 - DNA, 21 bp, synthetic construct
  misc_feature 1..21: note = n-mer motif encoding polynucleotide
  source 1..21: mol_type = other DNA
ggtcaagctttagtgtcgagt

SEQ ID NO: 3613 - protein, 7 aa, synthetic construct
  REGION 1..7: note = n-mer motif
TAVHSTS

SEQ ID NO: 3614 - DNA, 21 bp, synthetic construct
  misc_feature 1..21: note = n-mer motif encoding polynucleotide
  source 1..21: mol_type = other DNA
acggctgtgcattcgacttcg

SEQ ID NO: 3615 - protein, 7 aa, synthetic construct
  REGION 1..7: note = n-mer motif
KNPGLDH

SEQ ID NO: 3616 - DNA, 21 bp, synthetic construct
  misc_feature 1..21: note = n-mer motif encoding polynucleotide
  source 1..21: mol_type = other DNA
aaaaacccaggactagaccac

SEQ ID NO: 3617 - protein, 7 aa, synthetic construct
  REGION 1..7: note = n-mer motif
KSGLLID

SEQ ID NO: 3618 - DNA, 21 bp, synthetic construct
  misc_feature 1..21: note = n-mer motif encoding polynucleotide
  source 1..21: mol_type = other DNA
aaaagcggccttcttatagac

SEQ ID NO: 3619 - protein, 7 aa, synthetic construct
  REGION 1..7: note = n-mer motif
SGVTPLR

SEQ ID NO: 3620 - DNA, 21 bp, synthetic construct
  misc_feature 1..21: note = n-mer motif encoding polynucleotide
  source 1..21: mol_type = other DNA
tcgggagtaactccactccgt

SEQ ID NO: 3621 - protein, 7 aa, synthetic construct
  REGION 1..7: note = n-mer motif
REEQKVW

SEQ ID NO: 3622 - DNA, 21 bp, synthetic construct
  misc_feature 1..21: note = n-mer motif encoding polynucleotide
  source 1..21: mol_type = other DNA
agagaagaacaaaaagtctgg

SEQ ID NO: 3623 - protein, 7 aa, synthetic construct
  REGION 1..7: note = n-mer motif
LSQGSQM

SEQ ID NO: 3624 - DNA, 21 bp, synthetic construct
  misc_feature 1..21: note = n-mer motif encoding polynucleotide
  source 1..21: mol_type = other DNA
cttagtcaaggatcccaaatg

SEQ ID NO: 3625 - protein, 7 aa, synthetic construct
  REGION 1..7: note = n-mer motif
LSLTATS

SEQ ID NO: 3626 - DNA, 21 bp, synthetic construct
  misc_feature 1..21: note = n-mer motif encoding polynucleotide
  source 1..21: mol_type = other DNA
ctgtctctgacggctacgtct

SEQ ID NO: 3627 - protein, 7 aa, synthetic construct
  REGION 1..7: note = n-mer motif
KGSDTPK

SEQ ID NO: 3628 - DNA, 21 bp, synthetic construct
  misc_feature 1..21: note = n-mer motif encoding polynucleotide
  source 1..21: mol_type = other DNA
aagggttctgatactcctaag

SEQ ID NO: 3629 - protein, 7 aa, synthetic construct
  REGION 1..7: note = n-mer motif
SKPENAL

SEQ ID NO: 3630 - DNA, 21 bp, synthetic construct
  misc_feature 1..21: note = n-mer motif encoding polynucleotide
  source 1..21: mol_type = other DNA
tcgaaacccgaaaacgcacta

SEQ ID NO: 3631 - protein, 7 aa, synthetic construct
  REGION 1..7: note = n-mer motif
GGTNSAH

SEQ ID NO: 3632 - DNA, 21 bp, synthetic construct
  misc_feature 1..21: note = n-mer motif encoding polynucleotide
  source 1..21: mol_type = other DNA
gggggtacgaatagtgctcat

SEQ ID NO: 3633 - protein, 7 aa, synthetic construct
  REGION 1..7: note = n-mer motif
FSTDTLS

SEQ ID NO: 3634 - DNA, 21 bp, synthetic construct
  misc_feature 1..21: note = n-mer motif encoding polynucleotide
  source 1..21: mol_type = other DNA
ttcagcaccgacaccttatcg

SEQ ID NO: 3635 - protein, 7 aa, synthetic construct
  REGION 1..7: note = n-mer motif
SVDVTAK

SEQ ID NO: 3636 - DNA, 21 bp, synthetic construct
  misc_feature 1..21: note = n-mer motif encoding polynucleotide
  source 1..21: mol_type = other DNA
agtgttgatgtgacggcgaag

SEQ ID NO: 3637 - protein, 7 aa, synthetic construct
  REGION 1..7: note = n-mer motif
VAQGSVV

SEQ ID NO: 3638 - DNA, 21 bp, synthetic construct
  misc_feature 1..21: note = n-mer motif encoding polynucleotide
  source 1..21: mol_type = other DNA
gtggctcaggggtcggttgtt

SEQ ID NO: 3639 - protein, 7 aa, synthetic construct
  REGION 1..7: note = n-mer motif
TSGSGTS

SEQ ID NO: 3640 - DNA, 21 bp, synthetic construct
  misc_feature 1..21: note = n-mer motif encoding polynucleotide
  source 1..21: mol_type = other DNA
acttctggttctggtacgtcg

SEQ ID NO: 3641 - protein, 7 aa, synthetic construct
  REGION 1..7: note = n-mer motif
KEVRVSV

SEQ ID NO: 3642 - DNA, 21 bp, synthetic construct
  misc_feature 1..21: note = n-mer motif encoding polynucleotide
  source 1..21: mol_type = other DNA
aaggaggttcgtgtgtcggtt

SEQ ID NO: 3643 - protein, 7 aa, synthetic construct
  REGION 1..7: note = n-mer motif
RVDSVQL

SEQ ID NO: 3644 - DNA, 21 bp, synthetic construct
  misc_feature 1..21: note = n-mer motif encoding polynucleotide
  source 1..21: mol_type = other DNA
agagttgactcagttcaactg

SEQ ID NO: 3645 - protein, 7 aa, synthetic construct
  REGION 1..7: note = n-mer motif
TGVQTAV

SEQ ID NO: 3646 - DNA, 21 bp, synthetic construct
  misc_feature 1..21: note = n-mer motif encoding polynucleotide
  source 1..21: mol_type = other DNA
actggagtccaaaccgccgtc

SEQ ID NO: 3647 - protein, 7 aa, synthetic construct
  REGION 1..7: note = n-mer motif
AADSTER

SEQ ID NO: 3648 - DNA, 21 bp, synthetic construct
  misc_feature 1..21: note = n-mer motif encoding polynucleotide
  source 1..21: mol_type = other DNA
gcggcggatagtactgagcgg

SEQ ID NO: 3649 - protein, 7 aa, synthetic construct
  REGION 1..7: note = n-mer motif
GEAGKYS

SEQ ID NO: 3650 - DNA, 21 bp, synthetic construct
  misc_feature 1..21: note = n-mer motif encoding polynucleotide
  source 1..21: mol_type = other DNA
ggggaggctgggaagtattct

SEQ ID NO: 3651 - protein, 7 aa, synthetic construct
  REGION 1..7: note = n-mer motif
AGGGSPR

SEQ ID NO: 3652 - DNA, 21 bp, synthetic construct
  misc_feature 1..21: note = n-mer motif encoding polynucleotide
  source 1..21: mol_type = other DNA
gccggaggcggatcgcctcgt

SEQ ID NO: 3653 - protein, 7 aa, synthetic construct
  REGION 1..7: note = n-mer motif
GEAGTNS

SEQ ID NO: 3654 - DNA, 21 bp, synthetic construct
  misc_feature 1..21: note = n-mer motif encoding polynucleotide
  source 1..21: mol_type = other DNA
ggtgaagccggcacaaactcg

SEQ ID NO: 3655 - protein, 7 aa, synthetic construct
  REGION 1..7: note = n-mer motif
RVDSSQI

SEQ ID NO: 3656 - DNA, 21 bp, synthetic construct
  misc_feature 1..21: note = n-mer motif encoding polynucleotide
  source 1..21: mol_type = other DNA
agggtggattcgtcgcagatt

SEQ ID NO: 3657 - protein, 7 aa, synthetic construct
  REGION 1..7: note = n-mer motif
YTAGSMA

SEQ ID NO: 3658 - DNA, 21 bp, synthetic construct
  misc_feature 1..21: note = n-mer motif encoding polynucleotide
  source 1..21: mol_type = other DNA
tacactgctggcagcatggcc

SEQ ID NO: 3659 - protein, 7 aa, synthetic construct
  REGION 1..7: note = n-mer motif
MLGAGVS

SEQ ID NO: 3660 - DNA, 21 bp, synthetic construct
  misc_feature 1..21: note = n-mer motif encoding polynucleotide
  source 1..21: mol_type = other DNA
atgttgggtgctggggtgtcg

SEQ ID NO: 3661 - protein, 7 aa, synthetic construct
  REGION 1..7: note = n-mer motif
QADNNGR

SEQ ID NO: 3662 - DNA, 21 bp, synthetic construct
  misc_feature 1..21: note = n-mer motif encoding polynucleotide
  source 1..21: mol_type = other DNA
caggcggataataatggtagg

SEQ ID NO: 3663 - protein, 7 aa, synthetic construct
  REGION 1..7: note = n-mer motif
TLHDKVL

SEQ ID NO: 3664 - DNA, 21 bp, synthetic construct
  misc_feature 1..21: note = n-mer motif encoding polynucleotide
  source 1..21: mol_type = other DNA
accttgcacgacaaagtctta

SEQ ID NO: 3665 - protein, 7 aa, synthetic construct
  REGION 1..7: note = n-mer motif
VTKTLPQ

SEQ ID NO: 3666 - DNA, 21 bp, synthetic construct
  misc_feature 1..21: note = n-mer motif
  source 1..21: mol_type = other DNA
gtgaccaaaactttgccgcaa

SEQ ID NO: 3667 - protein, 7 aa, synthetic construct
  REGION 1..7: note = n-mer motif
QSLTDRV

SEQ ID NO: 3668 - DNA, 21 bp, synthetic construct
  misc_feature 1..21: note = n-mer motif encoding polynucleotide
  source 1..21: mol_type = other DNA
cagagtttgactgatcgggtt

SEQ ID NO: 3669 - protein, 7 aa, synthetic construct
  REGION 1..7: note = n-mer motif
ANRNESD

SEQ ID NO: 3670 - DNA, 21 bp, synthetic construct
  misc_feature 1..21: note = n-mer motif encoding polynucleotide
  source 1..21: mol_type = other DNA
gctaatcgtaatgagagtgat

SEQ ID NO: 3671 - protein, 7 aa, synthetic construct
  REGION 1..7: note = n-mer motif
TSHDTLV

SEQ ID NO: 3672 - DNA, 21 bp, synthetic construct
  misc_feature 1..21: note = n-mer motif encoding polynucleotide
  source 1..21: mol_type = other DNA
acgtcgcatgatacgttggtt

SEQ ID NO: 3673 - protein, 7 aa, synthetic construct
  REGION 1..7: note = n-mer motif
SEGLTRY

SEQ ID NO: 3674 - DNA, 21 bp, synthetic construct
  misc_feature 1..21: note = n-mer motif encoding polynucleotide
  source 1..21: mol_type = other DNA
tctgaaggcctcaccaggtac

SEQ ID NO: 3675 - protein, 7 aa, synthetic construct
  REGION 1..7: note = n-mer motif
SHGADSK

SEQ ID NO: 3676 - DNA, 21 bp, synthetic construct
  misc_feature 1..21: note = n-mer motif encoding polynucleotide
  source 1..21: mol_type = other DNA
tcacacggggccgacagcaaa

SEQ ID NO: 3677 - protein, 7 aa, synthetic construct
  REGION 1..7: note = n-mer motif
VLASTGH

SEQ ID NO: 3678 - DNA, 21 bp, synthetic construct
  misc_feature 1..21: note = n-mer motif encoding polynucleotide
  source 1..21: mol_type = other DNA
gtcttggcgagcaccgggcac

SEQ ID NO: 3679 - protein, 7 aa, synthetic construct
  REGION 1..7: note = n-mer motif
NHLSDRL

SEQ ID NO: 3680 - DNA, 21 bp, synthetic construct
  misc_feature 1..21: note = n-mer motif encoding polynucleotide
  source 1..21: mol_type = other DNA
aatcatcttagtgatcgtttg

SEQ ID NO: 3681 - protein, 7 aa, synthetic construct
  REGION 1..7: note = n-mer motif
MGRTDGL

SEQ ID NO: 3682 - DNA, 21 bp, synthetic construct
  misc_feature 1..21: note = n-mer motif encoding polynucleotide
  source 1..21: mol_type = other DNA
atgggaaggacggacggatta

SEQ ID NO: 3683 - protein, 7 aa, synthetic construct
  REGION 1..7: note = n-mer motif
VSTERGT

SEQ ID NO: 3684 - DNA, 21 bp, synthetic construct
  misc_feature 1..21: note = n-mer motif encoding polynucleotide
  source 1..21: mol_type = other DNA
gtgagtactgagcgggggact

SEQ ID NO: 3685 - protein, 7 aa, synthetic construct
  REGION 1..7: note = n-mer motif
SGHKAGV

SEQ ID NO: 3686 - DNA, 21 bp, synthetic construct
  misc_feature 1..21: note = n-mer motif encoding polynucleotide
  source 1..21: mol_type = other DNA
agtggtcacaaagcaggggtg

SEQ ID NO: 3687 - protein, 7 aa, synthetic construct
  REGION 1..7: note = n-mer motif
TSAEYNL

SEQ ID NO: 3688 - DNA, 21 bp, synthetic construct
  misc_feature 1..21: note = n-mer motif encoding polynucleotide
  source 1..21: mol_type = other DNA
acgagtgcggagtataatttg

SEQ ID NO: 3689 - protein, 7 aa, synthetic construct
  REGION 1..7: note = n-mer motif
RSSETVA

SEQ ID NO: 3690 - DNA, 21 bp, synthetic construct
  misc_feature 1..21: note = n-mer motif encoding polynucleotide
  source 1..21: mol_type = other DNA
cgttcatctgaaaccgtggca

SEQ ID NO: 3691 - protein, 7 aa, synthetic construct
  REGION 1..7: note = n-mer motif
NALSVKT

SEQ ID NO: 3692 - DNA, 21 bp, synthetic construct
  misc_feature 1..21: note = n-mer motif encoding polynucleotide
  source 1..21: mol_type = other DNA
aatgcgctgtctgtgaagact

SEQ ID NO: 3693 - protein, 7 aa, synthetic construct
  REGION 1..7: note = n-mer motif
KTEQVQP

SEQ ID NO: 3694 - DNA, 21 bp, synthetic construct
  misc_feature 1..21: note = n-mer motif encoding polynucleotide
  source 1..21: mol_type = other DNA
aagacggagcaggtgcagccg

SEQ ID NO: 3695 - protein, 7 aa, synthetic construct
  REGION 1..7: note = n-mer motif
RTLHDDT

SEQ ID NO: 3696 - DNA, 21 bp, synthetic construct
  misc_feature 1..21: note = n-mer motif encoding polynucleotide
  source 1..21: mol_type = other DNA
agaacactacacgacgacacg

SEQ ID NO: 3697 - protein, 7 aa, synthetic construct
  REGION 1..7: note = n-mer motif
QSVSYLK

SEQ ID NO: 3698 - DNA, 21 bp, synthetic construct
  misc_feature 1..21: note = n-mer motif encoding polynucleotide
  source 1..21: mol_type = other DNA
cagagtgtgtcgtatctgaag

SEQ ID NO: 3699 - protein, 7 aa, synthetic construct
  REGION 1..7: note = n-mer motif
ASGSAVA

SEQ ID NO: 3700 - DNA, 21 bp, synthetic construct
  misc_feature 1..21: note = n-mer motif encoding polynucleotide
  source 1..21: mol_type = other DNA
gcttctgggtcggcggtggct

SEQ ID NO: 3701 - protein, 7 aa, synthetic construct
  REGION 1..7: note = n-mer motif
MVTQQLK

SEQ ID NO: 3702 - DNA, 21 bp, synthetic construct
  misc_feature 1..21: note = n-mer motif encoding polynucleotide
  source 1..21: mol_type = other DNA
atggtgacgcagcagttgaag

SEQ ID NO: 3703 - protein, 7 aa, synthetic construct
  REGION 1..7: note = n-mer motif
KNSGVDP

SEQ ID NO: 3704 - DNA, 21 bp, synthetic construct
  misc_feature 1..21: note = n-mer motif encoding polynucleotide
  source 1..21: mol_type = other DNA
aaaaactctggcgtcgaccca

SEQ ID NO: 3705 - protein, 7 aa, synthetic construct
  REGION 1..7: note = n-mer motif
GGPAEGR

SEQ ID NO: 3706 - DNA, 21 bp, synthetic construct
  misc_feature 1..21: note = n-mer motif encoding polynucleotide
  source 1..21: mol_type = other DNA
ggagggccagccgaaggaagg

SEQ ID NO: 3707 - protein, 7 aa, synthetic construct
  REGION 1..7: note = n-mer motif
VKTSDRT

SEQ ID NO: 3708 - DNA, 21 bp, synthetic construct
  misc_feature 1..21: note = n-mer motif encoding polynucleotide
  source 1..21: mol_type = other DNA
gttaagacgtcggataggacg

SEQ ID NO: 3709 - protein, 7 aa, synthetic construct
  REGION 1..7: note = n-mer motif
NGVTLQV

SEQ ID NO: 3710 - DNA, 21 bp, synthetic construct
  misc_feature 1..21: note = n-mer motif encoding polynucleotide
  source 1..21: mol_type = other DNA
aacggggtaaccctacaagta

SEQ ID NO: 3711 - protein, 7 aa, synthetic construct
  REGION 1..7: note = n-mer motif
LSVSQSA

SEQ ID NO: 3712 - DNA, 21 bp, synthetic construct
  misc_feature 1..21: note = n-mer motif encoding polynucleotide
  source 1..21: mol_type = other DNA
ctgagtgtttctcagtcggcg

SEQ ID NO: 3713 - protein, 7 aa, synthetic construct
  REGION 1..7: note = n-mer motif
TRLQEGT

SEQ ID NO: 3714 - DNA, 21 bp, synthetic construct
  misc_feature 1..21: note = n-mer motif encoding polynucleotide
  source 1..21: mol_type = other DNA
acacgtctccaagaaggcacc

SEQ ID NO: 3715 - protein, 7 aa, synthetic construct
  REGION 1..7: note = n-mer motif
LSRGEEI

SEQ ID NO: 3716 - DNA, 21 bp, synthetic construct
  misc_feature 1..21: note = n-mer motif encoding polynucleotide
  source 1..21: mol_type = other DNA
ctttcgaggggtgaggagatt

SEQ ID NO: 3717 - protein, 7 aa, synthetic construct
  REGION 1..7: note = n-mer motif
SLGNSDH

SEQ ID NO: 3718 - DNA, 21 bp, synthetic construct
  misc_feature 1..21: note = n-mer motif encoding polynucleotide
  source 1..21: mol_type = other DNA
tcgttggggaattcggatcat

SEQ ID NO: 3719 - protein, 7 aa, synthetic construct
  REGION 1..7: note = n-mer motif
LAGVAQA

SEQ ID NO: 3720 - DNA, 21 bp, synthetic construct
  misc_feature 1..21: note = n-mer motif encoding polynucleotide
  source 1..21: mol_type = other DNA
ctagctggcgtggctcaagct

SEQ ID NO: 3721 - protein, 7 aa, synthetic construct
  REGION 1..7: note = n-mer motif
NGQTGKH

SEQ ID NO: 3722 - DNA, 21 bp, synthetic construct
  misc_feature 1..21: note = n-mer motif encoding polynucleotide
  source 1..21: mol_type = other DNA
aatgggcagacggggaagcat

SEQ ID NO: 3723 - protein, 7 aa, synthetic construct
  REGION 1..7: note = n-mer motif
VVTLGRQ

SEQ ID NO: 3724 - DNA, 21 bp, synthetic construct
  misc_feature 1..21: note = n-mer motif encoding polynucleotide
  source 1..21: mol_type = other DNA
gtggttactctgggtcgtcag

SEQ ID NO: 3725 - protein, 7 aa, synthetic construct
  REGION 1..7: note = n-mer motif
LNADTDR

SEQ ID NO: 3726 - DNA, 21 bp, synthetic construct
  misc_feature 1..21: note = n-mer motif encoding polynucleotide
  source 1..21: mol_type = other DNA
ctaaacgcagacactgaccgg

SEQ ID NO: 3727 - protein, 7 aa, synthetic construct
  REGION 1..7: note = n-mer motif
ASRLPQT

SEQ ID NO: 3728 - DNA, 21 bp, synthetic construct
  misc_feature 1..21: note = n-mer motif encoding polynucleotide
  source 1..21: mol_type = other DNA
gcgtctcggcttcctcagact

SEQ ID NO: 3729 - protein, 7 aa, synthetic construct
  REGION 1..7: note = n-mer motif
LTPGSQL

SEQ ID NO: 3730 - DNA, 21 bp, synthetic construct
  misc_feature 1..21: note = n-mer motif encoding polynucleotide
  source 1..21: mol_type = other DNA
ctgactccggggtcgcagctg

SEQ ID NO: 3731 - protein, 7 aa, synthetic construct
  REGION 1..7: note = n-mer motif
KSSDTPM

SEQ ID NO: 3732 - DNA, 21 bp, synthetic construct
  misc_feature 1..21: note = n-mer motif encoding polynucleotide
  source 1..21: mol_type = other DNA
aagagttctgatactcctatg

SEQ ID NO: 3733 - protein, 7 aa, synthetic construct
  REGION 1..7: note = n-mer motif
QIQSRSD

SEQ ID NO: 3734 - DNA, 21 bp, synthetic construct
  misc_feature 1..21: note = n-mer motif encoding polynucleotide
  source 1..21: mol_type = other DNA
cagattcagtctcgttctgat

SEQ ID NO: 3735 - protein, 7 aa, synthetic construct
  REGION 1..7: note = n-mer motif
NEIRVSV

SEQ ID NO: 3736 - DNA, 21 bp, synthetic construct
  misc_feature 1..21: note = n-mer motif encoding polynucleotide
  source 1..21: mol_type = other DNA
aatgagattcgtgtgtcggtt

SEQ ID NO: 3737 - protein, 7 aa, synthetic construct
  REGION 1..7: note = n-mer motif
LQSGVLT

SEQ ID NO: 3738 - DNA, 21 bp, synthetic construct
  misc_feature 1..21: note = n-mer motif encoding polynucleotide
  source 1..21: mol_type = other DNA
cttcagtcgggtgttctgact

SEQ ID NO: 3739 - protein, 7 aa, synthetic construct
  REGION 1..7: note = n-mer motif
LSANVRN

SEQ ID NO: 3740 - DNA, 21 bp, synthetic construct
  misc_feature 1..21: note = n-mer motif encoding polynucleotide
  source 1..21: mol_type = other DNA
ctatctgccaacgtacgtaac

SEQ ID NO: 3741 - protein, 7 aa, synthetic construct
  REGION 1..7: note = n-mer motif
ASVSSPH

SEQ ID NO: 3742 - DNA, 21 bp, synthetic construct
  misc_feature 1..21: note = n-mer motif encoding polynucleotide
  source 1..21: mol_type = other DNA
gcatcggtcagctccccacac

SEQ ID NO: 3743 - protein, 7 aa, synthetic construct
  REGION 1..7: note = n-mer motif
GGTINGH

SEQ ID NO: 3744 - DNA, 21 bp, synthetic construct
  misc_feature 1..21: note = n-mer motif encoding polynucleotide
  source 1..21: mol_type = other DNA
gggggtacgattaatggtcat

SEQ ID NO: 3745 - protein, 7 aa, synthetic construct
  REGION 1..7: note = n-mer motif
SLAGGTP

SEQ ID NO: 3746 - DNA, 21 bp, synthetic construct
  misc_feature 1..21: note = n-mer motif encoding polynucleotide
  source 1..21: mol_type = other DNA
agcttagcaggcggcacgccg

SEQ ID NO: 3747 - protein, 7 aa, synthetic construct
  REGION 1..7: note = n-mer motif
IGASVTL

SEQ ID NO: 3748 - DNA, 21 bp, synthetic construct
  misc_feature 1..21: note = n-mer motif encoding polynucleotide
  source 1..21: mol_type = other DNA
attggggctagtgttacgctt

SEQ ID NO: 3749 - protein, 7 aa, synthetic construct
  REGION 1..7: note = n-mer motif
GYGSGEA

SEQ ID NO: 3750 - DNA, 21 bp, synthetic construct
  misc_feature 1..21: note = n-mer motif encoding polynucleotide
  source 1..21: mol_type = other DNA
ggttatgggtcgggggaggct

SEQ ID NO: 3751 - protein, 7 aa, synthetic construct
  REGION 1..7: note = n-mer motif
MQKEGSP

SEQ ID NO: 3752 - DNA, 21 bp, synthetic construct
  misc_feature 1..21: note = n-mer motif encoding polynucleotide
  source 1..21: mol_type = other DNA
atgcagaaggaggggtcgccg

SEQ ID NO: 3753 - protein, 7 aa, synthetic construct
  REGION 1..7: note = n-mer motif
LSANLRT

SEQ ID NO: 3754 - DNA, 21 bp, synthetic construct
  misc_feature 1..21: note = n-mer motif encoding polynucleotide
  source 1..21: mol_type = other DNA
ttatctgcaaacctcagaacg

SEQ ID NO: 3755 - protein, 7 aa, synthetic construct
  REGION 1..7: note = n-mer motif
LSANVRT

SEQ ID NO: 3756 - DNA, 21 bp, synthetic construct
  misc_feature 1..21: note = n-mer motif encoding polynucleotide
  source 1..21: mol_type = other DNA
ctctctgcaaacgtacgtaca

SEQ ID NO: 3757 - protein, 7 aa, synthetic construct
  REGION 1..7: note = n-mer motif
ASLLPQP

SEQ ID NO: 3758 - DNA, 21 bp, synthetic construct
  misc_feature 1..21: note = n-mer motif encoding polynucleotide
  source 1..21: mol_type = other DNA
gcgtctctgcttcctcagcct

SEQ ID NO: 3759 - protein, 7 aa, synthetic construct
  REGION 1..7: note = n-mer motif
GTGEIGM

SEQ ID NO: 3760 - DNA, 21 bp, synthetic construct
  misc_feature 1..21: note = n-mer motif encoding polynucleotide
  source 1..21: mol_type = other DNA
gggactggtgagattggtatg

SEQ ID NO: 3761 - protein, 7 aa, synthetic construct
  REGION 1..7: note = n-mer motif
LGHKPGV

SEQ ID NO: 3762 - DNA, 21 bp, synthetic construct
  misc_feature 1..21: note = n-mer motif encoding polynucleotide
  source 1..21: mol_type = other DNA
ctaggtcacaaaccaggggtg

SEQ ID NO: 3763 - protein, 7 aa, synthetic construct
  REGION 1..7: note = n-mer motif
LNLTDGV

SEQ ID NO: 3764 - DNA, 21 bp, synthetic construct
  misc_feature 1..21: note = n-mer motif encoding polynucleotide
  source 1..21: mol_type = other DNA
ctgaatttgactgatggggtt

SEQ ID NO: 3765 - protein, 7 aa, synthetic construct
  REGION 1..7: note = n-mer motif
SEVSKGM

SEQ ID NO: 3766 - DNA, 21 bp, synthetic construct
  misc_feature 1..21: note = n-mer motif encoding polynucleotide
  source 1..21: mol_type = other DNA
agtgaggttagtaagggtatg

SEQ ID NO: 3767 - protein, 7 aa, synthetic construct
  REGION 1..7: note = n-mer motif
QSLTHGV

SEQ ID NO: 3768 - DNA, 21 bp, synthetic construct
  misc_feature 1..21: note = n-mer motif encoding polynucleotide
  source 1..21: mol_type = other DNA
cagagtttgactcatggggtt

SEQ ID NO: 3769 - protein, 7 aa, synthetic construct
  REGION 1..7: note = n-mer motif
VVQVPAR

SEQ ID NO: 3770 - DNA, 21 bp, synthetic construct
  misc_feature 1..21: note = n-mer motif encoding polynucleotide
  source 1..21: mol_type = other DNA
gttgttcaggttcctgcgcgt

SEQ ID NO: 3771 - protein, 7 aa, synthetic construct
  REGION 1..7: note = n-mer motif
MNGGHAL

SEQ ID NO: 3772 - DNA, 21 bp, synthetic construct
  misc_feature 1..21: note = n-mer motif encoding polynucleotide
  source 1..21: mol_type = other DNA
atgaatgggggtcatgctctg

SEQ ID NO: 3773 - protein, 7 aa, synthetic construct
  REGION 1..7: note = n-mer motif
GTLTLAY

SEQ ID NO: 3774 - DNA, 21 bp, synthetic construct
  misc_feature 1..21: note = n-mer motif encoding polynucleotide
  source 1..21: mol_type = other DNA
ggaactctcacgctggcctac

SEQ ID NO: 3775 - protein, 7 aa, synthetic construct
  REGION 1..7: note = n-mer motif
GAATSQI

SEQ ID NO: 3776 - DNA, 21 bp, synthetic construct
  misc_feature 1..21: note = n-mer motif encoding polynucleotide
  source 1..21: mol_type = other DNA
ggggcagcaacaagccaaatc

SEQ ID NO: 3777 - protein, 7 aa, synthetic construct
  REGION 1..7: note = n-mer motif
PTQGSLR

SEQ ID NO: 3778 - DNA, 21 bp, synthetic construct
  misc_feature 1..21: note = n-mer motif encoding polynucleotide
  source 1..21: mol_type = other DNA
ccgacacaaggatctctacgt

SEQ ID NO: 3779 - protein, 7 aa, synthetic construct
  REGION 1..7: note = n-mer motif
VAGSSIL

SEQ ID NO: 3780 - DNA, 21 bp, synthetic construct
  misc_feature 1..21: note = n-mer motif encoding polynucleotide
  source 1..21: mol_type = other DNA
gtcgccgggagtagcatattg

SEQ ID NO: 3781 - protein, 7 aa, synthetic construct
  REGION 1..7: note = n-mer motif
MLGGGMS

SEQ ID NO: 3782 - DNA, 21 bp, synthetic construct
  misc_feature 1..21: note = n-mer motif encoding polynucleotide
  source 1..21: mol_type = other DNA
atgttgggtggtgggatgtcg

SEQ ID NO: 3783 - protein, 7 aa, synthetic construct
  REGION 1..7: note = n-mer motif
GVAGTFS

SEQ ID NO: 3784 - DNA, 21 bp, synthetic construct
  misc_feature 1..21: note = n-mer motif encoding polynucleotide
  source 1..21: mol_type = other DNA
ggggtggctgggacgttttct

SEQ ID NO: 3785 - protein, 7 aa, synthetic construct
  REGION 1..7: note = n-mer motif
TIGHSQV

SEQ ID NO: 3786 - DNA, 21 bp, synthetic construct
  misc_feature 1..21: note = n-mer motif encoding polynucleotide
  source 1..21: mol_type = other DNA
accatcggacactcacaagtc

SEQ ID NO: 3787 - protein, 7 aa, synthetic construct
  REGION 1..7: note = n-mer motif
QSQKDVG

SEQ ID NO: 3788 - DNA, 21 bp, synthetic construct
  misc_feature 1..21: note = n-mer motif encoding polynucleotide
  source 1..21: mol_type = other DNA
caatcgcaaaaagacgtagga

SEQ ID NO: 3789 - protein, 7 aa, synthetic construct
  REGION 1..7: note = n-mer motif
GGTNSGH

SEQ ID NO: 3790 - DNA, 21 bp, synthetic construct
  misc_feature 1..21: note = n-mer motif encoding polynucleotide
  source 1..21: mol_type = other DNA
gggggtacgaatagtggtcat

SEQ ID NO: 3791 - protein, 7 aa, synthetic construct
  REGION 1..7: note = n-mer motif
GGVSSTK

SEQ ID NO: 3792 - DNA, 21 bp, synthetic construct
  misc_feature 1..21: note = n-mer motif encoding polynucleotide
  source 1..21: mol_type = other DNA
ggtggtgtttcttcgactaag

SEQ ID NO: 3793 - protein, 7 aa, synthetic construct
  REGION 1..7: note = n-mer motif
QVRDNNT

SEQ ID NO: 3794 - DNA, 21 bp, synthetic construct
  misc_feature 1..21: note = n-mer motif encoding polynucleotide
  source 1..21: mol_type = other DNA
caggtgcgtgataataatact

SEQ ID NO: 3795 - protein, 7 aa, synthetic construct
  REGION 1..7: note = n-mer motif
AGGGVPR

SEQ ID NO: 3796 - DNA, 21 bp, synthetic construct
  misc_feature 1..21: note = n-mer motif encoding polynucleotide
  source 1..21: mol_type = other DNA
gcggggggtggggttccgagg

SEQ ID NO: 3797 - protein, 7 aa, synthetic construct
  REGION 1..7: note = n-mer motif
ASVSSPP

SEQ ID NO: 3798 - DNA, 21 bp, synthetic construct
  misc_feature 1..21: note = n-mer motif encoding polynucleotide
  source 1..21: mol_type = other DNA
gcgtcggtaagtagtcccccg

SEQ ID NO: 3799 - protein, 7 aa, synthetic construct
  REGION 1..7: note = n-mer motif
MNGSHVL

SEQ ID NO: 3800 - DNA, 21 bp, synthetic construct
  misc_feature 1..21: note = n-mer motif encoding polynucleotide
  source 1..21: mol_type = other DNA
atgaatgggagtcatgttctg

SEQ ID NO: 3801 - protein, 7 aa, synthetic construct
  REGION 1..7: note = n-mer motif
VQHSQDN

SEQ ID NO: 3802 - DNA, 21 bp, synthetic construct
  misc_feature 1..21: note = n-mer motif encoding polynucleotide
  source 1..21: mol_type = other DNA
gtgcagcattcgcaggataat

SEQ ID NO: 3803 - protein, 7 aa, synthetic construct
  REGION 1..7: note = n-mer motif
KGASDTL

SEQ ID NO: 3804 - DNA, 21 bp, synthetic construct
  misc_feature 1..21: note = n-mer motif encoding polynucleotide
  source 1..21: mol_type = other DNA
aaaggcgcgtctgacaccctc

SEQ ID NO: 3805 - protein, 7 aa, synthetic construct
  REGION 1..7: note = n-mer motif
SMATGVK

SEQ ID NO: 3806 - DNA, 21 bp, synthetic construct
  misc_feature 1..21: note = n-mer motif encoding polynucleotide
  source 1..21: mol_type = other DNA
tcgatggcgacgggtgttaag

SEQ ID NO: 3807 - protein, 7 aa, synthetic construct
  REGION 1..7: note = n-mer motif
SVGSGLL

SEQ ID NO: 3808 - DNA, 21 bp, synthetic construct
  misc_feature 1..21: note = n-mer motif encoding polynucleotide
  source 1..21: mol_type = other DNA
tcggtggggagcggtttgctc

SEQ ID NO: 3809 - protein, 7 aa, synthetic construct
  REGION 1..7: note = n-mer motif
GAGSGVA

SEQ ID NO: 3810 - DNA, 21 bp, synthetic construct
  misc_feature 1..21: note = n-mer motif encoding polynucleotide
  source 1..21: mol_type = other DNA
ggtgctgggtcgggggtggct

SEQ ID NO: 3811 - protein, 7 aa, synthetic construct
  REGION 1..7: note = n-mer motif
MGSGERL

SEQ ID NO: 3812 - DNA, 21 bp, synthetic construct
  misc_feature 1..21: note = n-mer motif encoding polynucleotide
  source 1..21: mol_type = other DNA
atggggtctggggagcggttg

SEQ ID NO: 3813 - protein, 7 aa, synthetic construct
  REGION 1..7: note = n-mer motif
TGNDVRR

SEQ ID NO: 3814 - DNA, 21 bp, synthetic construct
  misc_feature 1..21: note = n-mer motif encoding polynucleotide
  source 1..21: mol_type = other DNA
accggcaacgacgtaagacgc

SEQ ID NO: 3815 - protein, 7 aa, synthetic construct
  REGION 1..7: note = n-mer motif
PNSGKDY

SEQ ID NO: 3816 - DNA, 21 bp, synthetic construct
  misc_feature 1..21: note = n-mer motif encoding polynucleotide
  source 1..21: mol_type = other DNA
cccaactcaggcaaagactac

SEQ ID NO: 3817 - protein, 7 aa, synthetic construct
  REGION 1..7: note = n-mer motif
LNSSTLR

SEQ ID NO: 3818 - DNA, 21 bp, synthetic construct
  misc_feature 1..21: note = n-mer motif encoding polynucleotide
  source 1..21: mol_type = other DNA
ctcaacagttctacactcagg

SEQ ID NO: 3819 - protein, 7 aa, synthetic construct
  REGION 1..7: note = n-mer motif
LGHKAGH

SEQ ID NO: 3820 - DNA, 21 bp, synthetic construct
  misc_feature 1..21: note = n-mer motif encoding polynucleotide
  source 1..21: mol_type = other DNA
ttggggcataaggctggtcat

SEQ ID NO: 3821 - protein, 7 aa, synthetic construct
  REGION 1..7: note = n-mer motif
LADSKDR

SEQ ID NO: 3822 - DNA, 21 bp, synthetic construct
  misc_feature 1..21: note = n-mer motif encoding polynucleotide
  source 1..21: mol_type = other DNA
ttggctgatagtaaggatcgg

SEQ ID NO: 3823 - protein, 7 aa, synthetic construct
  REGION 1..7: note = n-mer motif
LENQSLG

SEQ ID NO: 3824 - DNA, 21 bp, synthetic construct
  misc_feature 1..21: note = n-mer motif encoding polynucleotide
  source 1..21: mol_type = other DNA
ctggagaatcagagtcttggt

SEQ ID NO: 3825 - protein, 7 aa, synthetic construct
  REGION 1..7: note = n-mer motif
QYVVSGV

SEQ ID NO: 3826 - DNA, 21 bp, synthetic construct
  misc_feature 1..21: note = n-mer motif encoding polynucleotide
  source 1..21: mol_type = other DNA
caatacgtcgtctctggcgtt

SEQ ID NO: 3827 - protein, 7 aa, synthetic construct
  REGION 1..7: note = n-mer motif
MNGGRVL

SEQ ID NO: 3828 - DNA, 21 bp, synthetic construct
  misc_feature 1..21: note = n-mer motif encoding polynucleotide
  source 1..21: mol_type = other DNA
atgaatgggggtcgtgttctg

SEQ ID NO: 3829 - protein, 7 aa, synthetic construct
  REGION 1..7: note = n-mer motif
LSLTAGV

SEQ ID NO: 3830 - DNA, 21 bp, synthetic construct
  misc_feature 1..21: note = n-mer motif encoding polynucleotide
  source 1..21: mol_type = other DNA
ctgagtttgactgctggggtt

SEQ ID NO: 3831 - protein, 7 aa, synthetic construct
  REGION 1..7: note = n-mer motif
FGIASGA

SEQ ID NO: 3832 - DNA, 21 bp, synthetic construct
  misc_feature 1..21: note = n-mer motif encoding polynucleotide
  source 1..21: mol_type = other DNA
tttggtattgctagtggggcg

SEQ ID NO: 3833 - protein, 7 aa, synthetic construct
  REGION 1..7: note = n-mer motif
EGGYSGA

SEQ ID NO: 3834 - DNA, 21 bp, synthetic construct
  misc_feature 1..21: note = n-mer motif encoding polynucleotide
  source 1..21: mol_type = other DNA
gaaggggggtactcaggcgcg

SEQ ID NO: 3835 - protein, 7 aa, synthetic construct
  REGION 1..7: note = n-mer motif
VTLGATS

SEQ ID NO: 3836 - DNA, 21 bp, synthetic construct
  misc_feature 1..21: note = n-mer motif encoding polynucleotide
  source 1..21: mol_type = other DNA
gtaacactcggagcgaccagc

SEQ ID NO: 3837 - protein, 7 aa, synthetic construct
  REGION 1..7: note = n-mer motif
TGLQVGI

SEQ ID NO: 3838 - DNA, 21 bp, synthetic construct
  misc_feature 1..21: note = n-mer motif encoding polynucleotide
  source 1..21: mol_type = other DNA
actgggctgcaggttggtatt

SEQ ID NO: 3839 - protein, 7 aa, synthetic construct
  REGION 1..7: note = n-mer motif
IYPQSST

SEQ ID NO: 3840 - DNA, 21 bp, synthetic construct
  misc_feature 1..21: note = n-mer motif encoding polynucleotide
  source 1..21: mol_type = other DNA
atatacccgcaaagctcgaca

SEQ ID NO: 3841 - protein, 7 aa, synthetic construct
  REGION 1..7: note = n-mer motif
NANSLME

SEQ ID NO: 3842 - DNA, 21 bp, synthetic construct
  misc_feature 1..21: note = n-mer motif encoding polynucleotide
  source 1..21: mol_type = other DNA
aatgcgaattctttgatggag

SEQ ID NO: 3843 - protein, 7 aa, synthetic construct
  REGION 1..7: note = n-mer motif
LHDGNTR

SEQ ID NO: 3844 - DNA, 21 bp, synthetic construct
  misc_feature 1..21: note = n-mer motif encoding polynucleotide
  source 1..21: mol_type = other DNA
ttgcatgatgggaatacgcgg

SEQ ID NO: 3845 - protein, 7 aa, synthetic construct
  REGION 1..7: note = n-mer motif
GYGSGLA

SEQ ID NO: 3846 - DNA, 21 bp, synthetic construct
  misc_feature 1..21: note = n-mer motif encoding polynucleotide
  source 1..21: mol_type = other DNA
ggttatgggtcggggctggct

SEQ ID NO: 3847 - protein, 7 aa, synthetic construct
  REGION 1..7: note = n-mer motif
TIGHSQV

SEQ ID NO: 3848 - DNA, 21 bp, synthetic construct
  misc_feature 1..21: note = n-mer motif encoding polynucleotide
  source 1..21: mol_type = other DNA
acgattggtcatagtcaggtt

SEQ ID NO: 3849 - protein, 7 aa, synthetic construct
  REGION 1..7: note = n-mer motif
VANSGLA

SEQ ID NO: 3850 - DNA, 21 bp, synthetic construct
  misc_feature 1..21: note = n-mer motif encoding polynucleotide
  source 1..21: mol_type = other DNA
gtggcgaattctgggctggct

SEQ ID NO: 3851 - protein, 7 aa, synthetic construct
  REGION 1..7: note = n-mer motif
AGLLNAL

SEQ ID NO: 3852 - DNA, 21 bp, synthetic construct
  misc_feature 1..21: note = n-mer motif encoding polynucleotide
  source 1..21: mol_type = other DNA
gcggggttgctgaatgctttg

SEQ ID NO: 3853 - protein, 7 aa, synthetic construct
  REGION 1..7: note = n-mer motif
KNAGHVL

SEQ ID NO: 3854 - DNA, 21 bp, synthetic construct
  misc_feature 1..21: note = n-mer motif encoding polynucleotide
  source 1..21: mol_type = other DNA
aagaatgcgggtcatgttctg

SEQ ID NO: 3855 - protein, 7 aa, synthetic construct
  REGION 1..7: note = n-mer motif
PMSNTHP

SEQ ID NO: 3856 - DNA, 21 bp, synthetic construct
  misc_feature 1..21: note = n-mer motif encoding polynucleotide
  source 1..21: mol_type = other DNA
ccgatgtcgaatactcatccg

SEQ ID NO: 3857 - protein, 7 aa, synthetic construct
  REGION 1..7: note = n-mer motif
LAGSLPL

SEQ ID NO: 3858 - DNA, 21 bp, synthetic construct
  misc_feature 1..21: note = n-mer motif encoding polynucleotide
  source 1..21: mol_type = other DNA
cttgctggttcgcttccgttg

SEQ ID NO: 3859 - protein, 7 aa, synthetic construct
  REGION 1..7: note = n-mer motif
SRLENIS

SEQ ID NO: 3860 - DNA, 21 bp, synthetic construct
  misc_feature 1..21: note = n-mer motif encoding polynucleotide
  source 1..21: mol_type = other DNA
agtaggttggagaatattagt

SEQ ID NO: 3861 - protein, 7 aa, synthetic construct
  REGION 1..7: note = n-mer motif
HSEGVGR

SEQ ID NO: 3862 - DNA, 21 bp, synthetic construct
  misc_feature 1..21: note = n-mer motif encoding polynucleotide
  source 1..21: mol_type = other DNA
catagtgagggtgttgggcgg

SEQ ID NO: 3863 - protein, 7 aa, synthetic construct
  REGION 1..7: note = n-mer motif
GAPINSF

SEQ ID NO: 3864 - DNA, 21 bp, synthetic construct
  misc_feature 1..21: note = n-mer motif encoding polynucleotide
  source 1..21: mol_type = other DNA
ggagcaccaataaactctttc

SEQ ID NO: 3865 - protein, 7 aa, synthetic construct
  REGION 1..7: note = n-mer motif
GLEPRVP

SEQ ID NO: 3866 - DNA, 21 bp, synthetic construct
  misc_feature 1..21: note = n-mer motif encoding polynucleotide
  source 1..21: mol_type = other DNA
gggctggagcctcgtgttcct

SEQ ID NO: 3867 - protein, 7 aa, synthetic construct
  REGION 1..7: note = n-mer motif
PAREGNF

SEQ ID NO: 3868 - DNA, 21 bp, synthetic construct
  misc_feature 1..21: note = n-mer motif encoding polynucleotide
  source 1..21: mol_type = other DNA
cctgccagggaaggcaacttc

SEQ ID NO: 3869 - protein, 7 aa, synthetic construct
  REGION 1..7: note = n-mer motif
AAGGQVL

SEQ ID NO: 3870 - DNA, 21 bp, synthetic construct
  misc_feature 1..21: note = n-mer motif encoding polynucleotide
  source 1..21: mol_type = other DNA
gctgctgggggacaagtcctc

SEQ ID NO: 3871 - protein, 7 aa, synthetic construct
  REGION 1..7: note = n-mer motif
TSYDKLV

SEQ ID NO: 3872 - DNA, 21 bp, synthetic construct
  misc_feature 1..21: note = n-mer motif encoding polynucleotide
  source 1..21: mol_type = other DNA
acgtcgtatgataagttggtt

SEQ ID NO: 3873 - protein, 7 aa, synthetic construct
  REGION 1..7: note = n-mer motif
ELNAVAR

SEQ ID NO: 3874 - DNA, 21 bp, synthetic construct
  misc_feature 1..21: note = n-mer motif encoding polynucleotide
  source 1..21: mol_type = other DNA
gaacttaacgcagttgctcgg

SEQ ID NO: 3875 - protein, 7 aa, synthetic construct
  REGION 1..7: note = n-mer motif
SLRHVEV

SEQ ID NO: 3876 - DNA, 21 bp, synthetic construct
  misc_feature 1..21: note = n-mer motif encoding polynucleotide
  source 1..21: mol_type = other DNA
agcctacgccacgttgaagtc

SEQ ID NO: 3877 - protein, 7 aa, synthetic construct
  REGION 1..7: note = n-mer motif
AADSSGR

SEQ ID NO: 3878 - DNA, 21 bp, synthetic construct
  misc_feature 1..21: note = n-mer motif encoding polynucleotide
  source 1..21: mol_type = other DNA
gcggcggatagttctgggcgg

SEQ ID NO: 3879 - protein, 7 aa, synthetic construct
  REGION 1..7: note = n-mer motif
ANEVKHV

SEQ ID NO: 3880 - DNA, 21 bp, synthetic construct
  misc_feature 1..21: note = n-mer motif encoding polynucleotide
  source 1..21: mol_type = other DNA
gcgaatgaggttaagcatgtg

SEQ ID NO: 3881 - protein, 7 aa, synthetic construct
  REGION 1..7: note = n-mer motif
DLAQSGR

SEQ ID NO: 3882 - DNA, 21 bp, synthetic construct
  misc_feature 1..21: note = n-mer motif encoding polynucleotide
  source 1..21: mol_type = other DNA
gatttggctcagagtgggcgt

SEQ ID NO: 3883 - protein, 7 aa, synthetic construct
  REGION 1..7: note = n-mer motif
GLAGTNT

SEQ ID NO: 3884 - DNA, 21 bp, synthetic construct
  misc_feature 1..21: note = n-mer motif encoding polynucleotide
  source 1..21: mol_type = other DNA
gggctggctgggacgaatact

SEQ ID NO: 3885 - protein, 7 aa, synthetic construct
  REGION 1..7: note = n-mer motif
SPSIGPV

SEQ ID NO: 3886 - DNA, 21 bp, synthetic construct
  misc_feature 1..21: note = n-mer motif encoding polynucleotide
  source 1..21: mol_type = other DNA
tcgccttctattggtcctgtg

SEQ ID NO: 3887 - protein, 7 aa, synthetic construct
  REGION 1..7: note = n-mer motif
SVAGLSR

SEQ ID NO: 3888 - DNA, 21 bp, synthetic construct
  misc_feature 1..21: note = n-mer motif encoding polynucleotide
  source 1..21: mol_type = other DNA
tctgttgctggtctttctagg

SEQ ID NO: 3889 - protein, 7 aa, synthetic construct
  REGION 1..7: note = n-mer motif
ADVHVKV

SEQ ID NO: 3890 - DNA, 21 bp, synthetic construct
  misc_feature 1..21: note = n-mer motif encoding polynucleotide
  source 1..21: mol_type = other DNA
gcggatgttcatgtgaaggtg

SEQ ID NO: 3891 - protein, 7 aa, synthetic construct
  REGION 1..7: note = n-mer motif
IVKQGDI

SEQ ID NO: 3892 - DNA, 21 bp, synthetic construct
  misc_feature 1..21: note = n-mer motif encoding polynucleotide
  source 1..21: mol_type = other DNA
attgttaagcagggtgatatt

SEQ ID NO: 3893 - protein, 7 aa, synthetic construct
  REGION 1..7: note = n-mer motif
ASASGVA

SEQ ID NO: 3894 - DNA, 21 bp, synthetic construct
  misc_feature 1..21: note = n-mer motif encoding polynucleotide
  source 1..21: mol_type = other DNA
gcttctgcgtcgggggtggct

SEQ ID NO: 3895 - protein, 7 aa, synthetic construct
  REGION 1..7: note = n-mer motif
MGGGNIP

SEQ ID NO: 3896 - DNA, 21 bp, synthetic construct
  misc_feature 1..21: note = n-mer motif encoding polynucleotide
  source 1..21: mol_type = other DNA
atgggaggtggcaacataccc

SEQ ID NO: 3897 - protein, 7 aa, synthetic construct
  REGION 1..7: note = n-mer motif
TPTSSTR

SEQ ID NO: 3898 - DNA, 21 bp, synthetic construct
  misc_feature 1..21: note = n-mer motif encoding polynucleotide
  source 1..21: mol_type = other DNA
acaccaacatccagcacacga

SEQ ID NO: 3899 - protein, 7 aa, synthetic construct
  REGION 1..7: note = n-mer motif
VAEKAMA

SEQ ID NO: 3900 - DNA, 21 bp, synthetic construct
  misc_feature 1..21: note = n-mer motif encoding polynucleotide
  source 1..21: mol_type = other DNA
gtagctgaaaaagctatggca

SEQ ID NO: 3901 - protein, 7 aa, synthetic construct
  REGION 1..7: note = n-mer motif
GSGSGAA

SEQ ID NO: 3902 - DNA, 21 bp, synthetic construct
  misc_feature 1..21: note = n-mer motif encoding polynucleotide
  source 1..21: mol_type = other DNA
ggttctgggtcgggggcggct

SEQ ID NO: 3903 - protein, 7 aa, synthetic construct
  REGION 1..7: note = n-mer motif
NMQDGGM

SEQ ID NO: 3904 - DNA, 21 bp, synthetic construct
  misc_feature 1..21: note = n-mer motif encoding polynucleotide
  source 1..21: mol_type = other DNA
aacatgcaagacggcggcatg

SEQ ID NO: 3905 - protein, 7 aa, synthetic construct
  REGION 1..7: note = n-mer motif
QLRDNKT

SEQ ID NO: 3906 - DNA, 21 bp, synthetic construct
  misc_feature 1..21: note = n-mer motif encoding polynucleotide
  source 1..21: mol_type = other DNA
caattacgcgacaacaaaacg

SEQ ID NO: 3907 - protein, 7 aa, synthetic construct
  REGION 1..7: note = n-mer motif
HAGLGVI

SEQ ID NO: 3908 - DNA, 21 bp, synthetic construct
  misc_feature 1..21: note = n-mer motif encoding polynucleotide
  source 1..21: mol_type = other DNA
catgctggtcttggtgttatt

SEQ ID NO: 3909 - protein, 7 aa, synthetic construct
  REGION 1..7: note = n-mer motif
VNVSYRA

SEQ ID NO: 3910 - DNA, 21 bp, synthetic construct
  misc_feature 1..21: note = n-mer motif encoding polynucleotide
  source 1..21: mol_type = other DNA
gtgaatgtttcgtatcgtgct

SEQ ID NO: 3911 - protein, 7 aa, synthetic construct
  REGION 1..7: note = n-mer motif
IRNDKGP

SEQ ID NO: 3912 - DNA, 21 bp, synthetic construct
  misc_feature 1..21: note = n-mer motif encoding polynucleotide
  source 1..21: mol_type = other DNA
atccgaaacgacaaagggcct

SEQ ID NO: 3913 - protein, 7 aa, synthetic construct
  REGION 1..7: note = n-mer motif
ASLAQAV

SEQ ID NO: 3914 - DNA, 21 bp, synthetic construct
  misc_feature 1..21: note = n-mer motif encoding polynucleotide
  source 1..21: mol_type = other DNA
gctagtcttgcacaagcagtt

SEQ ID NO: 3915 - protein, 7 aa, synthetic construct
  REGION 1..7: note = n-mer motif
TLSHAEL

SEQ ID NO: 3916 - DNA, 21 bp, synthetic construct
  misc_feature 1..21: note = n-mer motif encoding polynucleotide
  source 1..21: mol_type = other DNA
acgttgtctcatgctgagctg

SEQ ID NO: 3917 - protein, 7 aa, synthetic construct
  REGION 1..7: note = n-mer motif
TYSDGST

SEQ ID NO: 3918 - DNA, 21 bp, synthetic construct
  misc_feature 1..21: note = n-mer motif encoding polynucleotide
  source 1..21: mol_type = other DNA
acctactctgacggttctacc

SEQ ID NO: 3919 - protein, 7 aa, synthetic construct
  REGION 1..7: note = n-mer motif
REKGVTV

SEQ ID NO: 3920 - DNA, 21 bp, synthetic construct
  misc_feature 1..21: note = n-mer motif encoding polynucleotide
  source 1..21: mol_type = other DNA
agagaaaaaggggtcacggtc

SEQ ID NO: 3921 - protein, 7 aa, synthetic construct
  REGION 1..7: note = n-mer motif
ENRVYSP

SEQ ID NO: 3922 - DNA, 21 bp, synthetic construct
  misc_feature 1..21: note = n-mer motif encoding polynucleotide
  source 1..21: mol_type = other DNA
gagaatcgtgtttattctccg

SEQ ID NO: 3923 - protein, 7 aa, synthetic construct
  REGION 1..7: note = n-mer motif
ATQGTLR

SEQ ID NO: 3924 - DNA, 21 bp, synthetic construct
  misc_feature 1..21: note = n-mer motif encoding polynucleotide
  source 1..21: mol_type = other DNA
gctactcaggggacgcttcgg

SEQ ID NO: 3925 - protein, 7 aa, synthetic construct
  REGION 1..7: note = n-mer motif
KHVDTGA

SEQ ID NO: 3926 - DNA, 21 bp, synthetic construct
  misc_feature 1..21: note = n-mer motif encoding polynucleotide
  source 1..21: mol_type = other DNA
aagcatgtggatacgggggcg

SEQ ID NO: 3927 - protein, 7 aa, synthetic construct
  REGION 1..7: note = n-mer motif
LANKMSD

SEQ ID NO: 3928 - DNA, 21 bp, synthetic construct
  misc_feature 1..21: note = n-mer motif encoding polynucleotide
  source 1..21: mol_type = other DNA
ctggctaataagatgagtgat

SEQ ID NO: 3929 - protein, 7 aa, synthetic construct
  REGION 1..7: note = n-mer motif
TLVGVVS

SEQ ID NO: 3930 - DNA, 21 bp, synthetic construct
  misc_feature 1..21: note = n-mer motif encoding polynucleotide
  source 1..21: mol_type = other DNA
accctcgtgggggtagtctct

SEQ ID NO: 3931 - protein, 7 aa, synthetic construct
  REGION 1..7: note = n-mer motif
GVPGTNS

SEQ ID NO: 3932 - DNA, 21 bp, synthetic construct
  misc_feature 1..21: note = n-mer motif encoding polynucleotide
  source 1..21: mol_type = other DNA
ggtgttcccggtactaactcc

SEQ ID NO: 3933 - protein, 7 aa, synthetic construct
  REGION 1..7: note = n-mer motif
RTDGADL

SEQ ID NO: 3934 - DNA, 21 bp, synthetic construct
  misc_feature 1..21: note = n-mer motif encoding polynucleotide
  source 1..21: mol_type = other DNA
cgtacggatggtgcggatctt

SEQ ID NO: 3935 - protein, 7 aa, synthetic construct
  REGION 1..7: note = n-mer motif
PTQGTLL

SEQ ID NO: 3936 - DNA, 21 bp, synthetic construct
  misc_feature 1..21: note = n-mer motif encoding polynucleotide
  source 1..21: mol_type = other DNA
ccgacacaaggaactttgttg

SEQ ID NO: 3937 - protein, 7 aa, synthetic construct
  REGION 1..7: note = n-mer motif
SHASDTK

SEQ ID NO: 3938 - DNA, 21 bp, synthetic construct
  misc_feature 1..21: note = n-mer motif encoding polynucleotide
  source 1..21: mol_type = other DNA
tctcatgcttctgatacgaag

SEQ ID NO: 3939 - protein, 7 aa, synthetic construct
  REGION 1..7: note = n-mer motif
AVVSAGP

SEQ ID NO: 3940 - DNA, 21 bp, synthetic construct
  misc_feature 1..21: note = n-mer motif encoding polynucleotide
  source 1..21: mol_type = other DNA
gcggtggtgtctgctgggccg

SEQ ID NO: 3941 - protein, 7 aa, synthetic construct
  REGION 1..7: note = n-mer motif
HNPQSLG

SEQ ID NO: 3942 - DNA, 21 bp, synthetic construct
  misc_feature 1..21: note = n-mer motif encoding polynucleotide
  source 1..21: mol_type = other DNA
cacaaccctcaatctctcggt

SEQ ID NO: 3943 - protein, 7 aa, synthetic construct
  REGION 1..7: note = n-mer motif
TSLGIML

SEQ ID NO: 3944 - DNA, 21 bp, synthetic construct
  misc_feature 1..21: note = n-mer motif encoding polynucleotide
  source 1..21: mol_type = other DNA
accagcctaggaataatgctt

SEQ ID NO: 3945 - protein, 7 aa, synthetic construct
  REGION 1..7: note = n-mer motif
RPQGSES

SEQ ID NO: 3946 - DNA, 21 bp, synthetic construct
  misc_feature 1..21: note = n-mer motif encoding polynucleotide
  source 1..21: mol_type = other DNA
cgtcctcagggtagtgagagt

SEQ ID NO: 3947 - protein, 7 aa, synthetic construct
  REGION 1..7: note = n-mer motif
AVNNVTL

SEQ ID NO: 3948 - DNA, 21 bp, synthetic construct
  misc_feature 1..21: note = n-mer motif encoding polynucleotide
  source 1..21: mol_type = other DNA
gctgtgaataatgttactctt

SEQ ID NO: 3949 - protein, 7 aa, synthetic construct
  REGION 1..7: note = n-mer motif
NGSAGNR

SEQ ID NO: 3950 - DNA, 21 bp, synthetic construct
  misc_feature 1..21: note = n-mer motif encoding polynucleotide
  source 1..21: mol_type = other DNA
aacggtagcgctgggaaccgc

SEQ ID NO: 3951 - protein, 7 aa, synthetic construct
  REGION 1..7: note = n-mer motif
VFGETRA

SEQ ID NO: 3952 - DNA, 21 bp, synthetic construct
  misc_feature 1..21: note = n-mer motif encoding polynucleotide
  source 1..21: mol_type = other DNA
gtttttggtgagacgcgtgcg

SEQ ID NO: 3953 - protein, 7 aa, synthetic construct
  REGION 1..7: note = n-mer motif
ASESSPS

SEQ ID NO: 3954 - DNA, 21 bp, synthetic construct
  misc_feature 1..21: note = n-mer motif encoding polynucleotide
  source 1..21: mol_type = other DNA
gcatcggaatcaagcccatct

SEQ ID NO: 3955 - protein, 7 aa, synthetic construct
  REGION 1..7: note = n-mer motif
NSVGASI

SEQ ID NO: 3956 - DNA, 21 bp, synthetic construct
  misc_feature 1..21: note = n-mer motif encoding polynucleotide
  source 1..21: mol_type = other DNA
aacagtgtaggagcgtcaatc

SEQ ID NO: 3957 - protein, 7 aa, synthetic construct
  REGION 1..7: note = n-mer motif
DAGNQMG

SEQ ID NO: 3958 - DNA, 21 bp, synthetic construct
  misc_feature 1..21: note = n-mer motif encoding polynucleotide
  source 1..21: mol_type = other DNA
gatgcggggaatcagatgggg

SEQ ID NO: 3959 - protein, 7 aa, synthetic construct
  REGION 1..7: note = n-mer motif
GSGRDGL

SEQ ID NO: 3960 - DNA, 21 bp, synthetic construct
  misc_feature 1..21: note = n-mer motif encoding polynucleotide
  source 1..21: mol_type = other DNA
ggtagtggaagagacggactg

SEQ ID NO: 3961 - protein, 7 aa, synthetic construct
  REGION 1..7: note = n-mer motif
STVTGGP

SEQ ID NO: 3962 - DNA, 21 bp, synthetic construct
  misc_feature 1..21: note = n-mer motif encoding polynucleotide
  source 1..21: mol_type = other DNA
agtactgttactgggggtccg

SEQ ID NO: 3963 - protein, 7 aa, synthetic construct
  REGION 1..7: note = n-mer motif
TSYDKMV

SEQ ID NO: 3964 - DNA, 21 bp, synthetic construct
  misc_feature 1..21: note = n-mer motif encoding polynucleotide
  source 1..21: mol_type = other DNA
acgtcgtatgataagatggtt

SEQ ID NO: 3965 - protein, 7 aa, synthetic construct
  REGION 1..7: note = n-mer motif
SGANLSN

SEQ ID NO: 3966 - DNA, 21 bp, synthetic construct
  misc_feature 1..21: note = n-mer motif encoding polynucleotide
  source 1..21: mol_type = other DNA
tctggtgcgaatttgtctaat

SEQ ID NO: 3967 - protein, 7 aa, synthetic construct
  REGION 1..7: note = n-mer motif
VKSTEGT

SEQ ID NO: 3968 - DNA, 21 bp, synthetic construct
  misc_feature 1..21: note = n-mer motif encoding polynucleotide
  source 1..21: mol_type = other DNA
gttaaatccacggaaggaaca

SEQ ID NO: 3969 - protein, 7 aa, synthetic construct
  REGION 1..7: note = n-mer motif
GKDGHQM

SEQ ID NO: 3970 - DNA, 21 bp, synthetic construct
  misc_feature 1..21: note = n-mer motif encoding polynucleotide
  source 1..21: mol_type = other DNA
gggaaggatggtcatcagatg

SEQ ID NO: 3971 - protein, 7 aa, synthetic construct
  REGION 1..7: note = n-mer motif
LGQKAGV

SEQ ID NO: 3972 - DNA, 21 bp, synthetic construct
  misc_feature 1..21: note = n-mer motif encoding polynucleotide
  source 1..21: mol_type = other DNA
cttggccaaaaagcaggagtc

SEQ ID NO: 3973 - protein, 7 aa, synthetic construct
  REGION 1..7: note = n-mer motif
REQQKIW

SEQ ID NO: 3974 - DNA, 21 bp, synthetic construct
  misc_feature 1..21: note = n-mer motif encoding polynucleotide
  source 1..21: mol_type = other DNA
agagaacaacaaaaaatatgg

SEQ ID NO: 3975 - protein, 7 aa, synthetic construct
  REGION 1..7: note = n-mer motif
AGNLSVK

SEQ ID NO: 3976 - DNA, 21 bp, synthetic construct
  misc_feature 1..21: note = n-mer motif encoding polynucleotide
  source 1..21: mol_type = other DNA
gcggggaatctgagtgtgaag

SEQ ID NO: 3977 - protein, 7 aa, synthetic construct
  REGION 1..7: note = n-mer motif
SHSLIEV

SEQ ID NO: 3978 - DNA, 21 bp, synthetic construct
  misc_feature 1..21: note = n-mer motif encoding polynucleotide
  source 1..21: mol_type = other DNA
tctcatagtctgattgaggtg

SEQ ID NO: 3979 - protein, 7 aa, synthetic construct
  REGION 1..7: note = n-mer motif
HVSGASL

SEQ ID NO: 3980 - DNA, 21 bp, synthetic construct
  misc_feature 1..21: note = n-mer motif encoding polynucleotide
  source 1..21: mol_type = other DNA
catgtttcgggtgcttctctt

SEQ ID NO: 3981 - protein, 7 aa, synthetic construct
  REGION 1..7: note = n-mer motif
LNLKGVV

SEQ ID NO: 3982 - DNA, 21 bp, synthetic construct
  misc_feature 1..21: note = n-mer motif encoding polynucleotide
  source 1..21: mol_type = other DNA
ttgaatctgaagggtgtggtt

SEQ ID NO: 3983 - protein, 7 aa, synthetic construct
  REGION 1..7: note = n-mer motif
AHEARGD

SEQ ID NO: 3984 - DNA, 21 bp, synthetic construct
  misc_feature 1..21: note = n-mer motif encoding polynucleotide
  source 1..21: mol_type = other DNA
gcgcacgaagcacgaggggac

SEQ ID NO: 3985 - protein, 7 aa, synthetic construct
  REGION 1..7: note = n-mer motif
HANTAGV

SEQ ID NO: 3986 - DNA, 21 bp, synthetic construct
  misc_feature 1..21: note = n-mer motif encoding polynucleotide
  source 1..21: mol_type = other DNA
catgcgaatactgctggggtg

SEQ ID NO: 3987 - protein, 7 aa, synthetic construct
  REGION 1..7: note = n-mer motif
TGAGGHP

SEQ ID NO: 3988 - DNA, 21 bp, synthetic construct
  misc_feature 1..21: note = n-mer motif encoding polynucleotide
  source 1..21: mol_type = other DNA
acgggtgctggtgggcatcct

SEQ ID NO: 3989 - protein, 7 aa, synthetic construct
  REGION 1..7: note = n-mer motif
LSRGQEM

SEQ ID NO: 3990 - DNA, 21 bp, synthetic construct
  misc_feature 1..21: note = n-mer motif encoding polynucleotide
  source 1..21: mol_type = other DNA
ctgtcacgagggcaagaaatg

SEQ ID NO: 3991 - protein, 7 aa, synthetic construct
  REGION 1..7: note = n-mer motif
LSNHGHV

SEQ ID NO: 3992 - DNA, 21 bp, synthetic construct
  misc_feature 1..21: note = n-mer motif encoding polynucleotide
  source 1..21: mol_type = other DNA
ctgagtaatcatgggcatgtt

SEQ ID NO: 3993 - protein, 7 aa, synthetic construct
  REGION 1..7: note = n-mer motif
STHHTST

SEQ ID NO: 3994 - DNA, 21 bp, synthetic construct
  misc_feature 1..21: note = n-mer motif encoding polynucleotide
  source 1..21: mol_type = other DNA
tctacacaccacacctcaacc

SEQ ID NO: 3995 - protein, 7 aa, synthetic construct
  REGION 1..7: note = n-mer motif
QKISTVQ

SEQ ID NO: 3996 - DNA, 21 bp, synthetic construct
  misc_feature 1..21: note = n-mer motif encoding polynucleotide
  source 1..21: mol_type = other DNA
cagaagatttcgactgtgcag

SEQ ID NO: 3997 - protein, 7 aa, synthetic construct
  REGION 1..7: note = n-mer motif
GVRNTNV

SEQ ID NO: 3998 - DNA, 21 bp, synthetic construct
  misc_feature 1..21: note = n-mer motif encoding polynucleotide
  source 1..21: mol_type = other DNA
ggagtccggaacacaaacgta

SEQ ID NO: 3999 - protein, 7 aa, synthetic construct
  REGION 1..7: note = n-mer motif
LTVSLNK

SEQ ID NO: 4000 - DNA, 21 bp, synthetic construct
  misc_feature 1..21: note = n-mer motif encoding polynucleotide
  source 1..21: mol_type = other DNA
ctaactgtatctcttaacaaa

SEQ ID NO: 4001 - protein, 7 aa, synthetic construct
  REGION 1..7: note = n-mer motif
LSNNGPV

SEQ ID NO: 4002 - DNA, 21 bp, synthetic construct
  misc_feature 1..21: note = n-mer motif encoding polynucleotide
  source 1..21: mol_type = other DNA
ctctctaacaacggccccgtg

SEQ ID NO: 4003 - protein, 7 aa, synthetic construct
  REGION 1..7: note = n-mer motif
LNLKGVV

SEQ ID NO: 4004 - DNA, 21 bp, synthetic construct
  misc_feature 1..21: note = n-mer motif encoding polynucleotide
  source 1..21: mol_type = other DNA
cttaacctcaaaggggtcgtc

SEQ ID NO: 4005 - protein, 7 aa, synthetic construct
  REGION 1..7: note = n-mer motif
PKPSHGE

SEQ ID NO: 4006 - DNA, 21 bp, synthetic construct
  misc_feature 1..21: note = n-mer motif encoding polynucleotide
  source 1..21: mol_type = other DNA
ccgaagcctagtcatggtgag

SEQ ID NO: 4007 - protein, 7 aa, synthetic construct
  REGION 1..7: note = n-mer motif
ETNRGSV

SEQ ID NO: 4008 - DNA, 21 bp, synthetic construct
  misc_feature 1..21: note = n-mer motif encoding polynucleotide
  source 1..21: mol_type = other DNA
gaaacaaaccggggatccgta

SEQ ID NO: 4009 - protein, 7 aa, synthetic construct
  REGION 1..7: note = n-mer motif
NLTSDKV

SEQ ID NO: 4010 - DNA, 21 bp, synthetic construct
  misc_feature 1..21: note = n-mer motif encoding polynucleotide
  source 1..21: mol_type = other DNA
aatctgacgtctgataaggtt

SEQ ID NO: 4011 - protein, 7 aa, synthetic construct
  REGION 1..7: note = n-mer motif
MEDRART

SEQ ID NO: 4012 - DNA, 21 bp, synthetic construct
  misc_feature 1..21: note = n-mer motif encoding polynucleotide
  source 1..21: mol_type = other DNA
atggaggatagggctcggact

SEQ ID NO: 4013 - protein, 7 aa, synthetic construct
  REGION 1..7: note = n-mer motif
GVAGTNS

SEQ ID NO: 4014 - DNA, 21 bp, synthetic construct
  misc_feature 1..21: note = n-mer motif encoding polynucleotide
  source 1..21: mol_type = other DNA
ggggtggctgggacgaattct

SEQ ID NO: 4015 - protein, 7 aa, synthetic construct
  REGION 1..7: note = n-mer motif
SLGQDKL

SEQ ID NO: 4016 - DNA, 21 bp, synthetic construct
  misc_feature 1..21: note = n-mer motif encoding polynucleotide
  source 1..21: mol_type = other DNA
agtctaggccaagacaaattg

SEQ ID NO: 4017 - protein, 7 aa, synthetic construct
  REGION 1..7: note = n-mer motif
GVGEGRA

SEQ ID NO: 4018 - DNA, 21 bp, synthetic construct
  misc_feature 1..21: note = n-mer motif encoding polynucleotide
  source 1..21: mol_type = other DNA
ggcgtcggggaaggacgagcc

SEQ ID NO: 4019 - protein, 7 aa, synthetic construct
  REGION 1..7: note = n-mer motif
ASLLPPT

SEQ ID NO: 4020 - DNA, 21 bp, synthetic construct
  misc_feature 1..21: note = n-mer motif encoding polynucleotide
  source 1..21: mol_type = other DNA
gcatcgctcttgccccccacg

SEQ ID NO: 4021 - protein, 7 aa, synthetic construct
  REGION 1..7: note = n-mer motif
TALVLHK

SEQ ID NO: 4022 - DNA, 21 bp, synthetic construct
  misc_feature 1..21: note = n-mer motif encoding polynucleotide
  source 1..21: mol_type = other DNA
acggctcttgttcttcataag

SEQ ID NO: 4023 - protein, 7 aa, synthetic construct
  REGION 1..7: note = n-mer motif
AVSDHTV

SEQ ID NO: 4024 - DNA, 21 bp, synthetic construct
  misc_feature 1..21: note = n-mer motif encoding polynucleotide
  source 1..21: mol_type = other DNA
gctgttagtgatcatactgtg

SEQ ID NO: 4025 - protein, 7 aa, synthetic construct
  REGION 1..7: note = n-mer motif
SQSAIPN

SEQ ID NO: 4026 - DNA, 21 bp, synthetic construct
  misc_feature 1..21: note = n-mer motif encoding polynucleotide
  source 1..21: mol_type = other DNA
agtcagtcggctattcctaat

SEQ ID NO: 4027 - protein, 7 aa, synthetic construct
  REGION 1..7: note = n-mer motif
MNGGHLQ

SEQ ID NO: 4028 - DNA, 21 bp, synthetic construct
  misc_feature 1..21: note = n-mer motif encoding polynucleotide
  source 1..21: mol_type = other DNA
atgaatgggggtcatcttcag

SEQ ID NO: 4029 - protein, 7 aa, synthetic construct
  REGION 1..7: note = n-mer motif
KNGGNVL

SEQ ID NO: 4030 - DNA, 21 bp, synthetic construct
  misc_feature 1..21: note = n-mer motif encoding polynucleotide
  source 1..21: mol_type = other DNA
aaaaacggtggaaacgtgttg

SEQ ID NO: 4031 - protein, 7 aa, synthetic construct
  REGION 1..7: note = n-mer motif
GAVSSTT

SEQ ID NO: 4032 - DNA, 21 bp, synthetic construct
  misc_feature 1..21: note = n-mer motif encoding polynucleotide
  source 1..21: mol_type = other DNA
ggtgctgtttcttcgactacg

SEQ ID NO: 4033 - protein, 7 aa, synthetic construct
  REGION 1..7: note = n-mer motif
STLNTST

SEQ ID NO: 4034 - DNA, 21 bp, synthetic construct
  misc_feature 1..21: note = n-mer motif encoding polynucleotide
  source 1..21: mol_type = other DNA
agtactcttaatacttcgact

SEQ ID NO: 4035 - protein, 7 aa, synthetic construct
  REGION 1..7: note = n-mer motif
RSPNVGQ

SEQ ID NO: 4036 - DNA, 21 bp, synthetic construct
  misc_feature 1..21: note = n-mer motif encoding polynucleotide
  source 1..21: mol_type = other DNA
aggtcgcctaatgttgggcag

SEQ ID NO: 4037 - protein, 7 aa, synthetic construct
  REGION 1..7: note = n-mer motif
PTQGTFR

SEQ ID NO: 4038 - DNA, 21 bp, synthetic construct
  misc_feature 1..21: note = n-mer motif encoding polynucleotide
  source 1..21: mol_type = other DNA
cctactcaggggacgtttcgg

SEQ ID NO: 4039 - protein, 7 aa, synthetic construct
  REGION 1..7: note = n-mer motif
NHGSDSK

SEQ ID NO: 4040 - DNA, 21 bp, synthetic construct
  misc_feature 1..21: note = n-mer motif encoding polynucleotide
  source 1..21: mol_type = other DNA
aaccacgggtcagacagcaaa

SEQ ID NO: 4041 - protein, 7 aa, synthetic construct
  REGION 1..7: note = n-mer motif
LPSGHLH

SEQ ID NO: 4042 - DNA, 21 bp, synthetic construct
  misc_feature 1..21: note = n-mer motif encoding polynucleotide
  source 1..21: mol_type = other DNA
cttccgagtggtcatcttcat

SEQ ID NO: 4043 - protein, 7 aa, synthetic construct
  REGION 1..7: note = n-mer motif
SEKVVAT

SEQ ID NO: 4044 - DNA, 21 bp, synthetic construct
  misc_feature 1..21: note = n-mer motif encoding polynucleotide
  source 1..21: mol_type = other DNA
tcggagaaggtggtggcgacg

SEQ ID NO: 4045 - protein, 7 aa, synthetic construct
  REGION 1..7: note = n-mer motif
TVPNTVL

SEQ ID NO: 4046 - DNA, 21 bp, synthetic construct
  misc_feature 1..21: note = n-mer motif encoding polynucleotide
  source 1..21: mol_type = other DNA
accgttcccaacacagtcctg

SEQ ID NO: 4047 - protein, 7 aa, synthetic construct
  REGION 1..7: note = n-mer motif
LSIGQGH

SEQ ID NO: 4048 - DNA, 21 bp, synthetic construct
  misc_feature 1..21: note = n-mer motif encoding polynucleotide
  source 1..21: mol_type = other DNA
ctatccataggacaaggacac

SEQ ID NO: 4049 - protein, 7 aa, synthetic construct
  REGION 1..7: note = n-mer motif
TSVLSQV

SEQ ID NO: 4050 - DNA, 21 bp, synthetic construct
  misc_feature 1..21: note = n-mer motif encoding polynucleotide
  source 1..21: mol_type = other DNA
acgagtgttctttcgcaggtt

SEQ ID NO: 4051 - protein, 7 aa, synthetic construct
  REGION 1..7: note = n-mer motif
VLSSHGP

SEQ ID NO: 4052 - DNA, 21 bp, synthetic construct
  misc_feature 1..21: note = n-mer motif encoding polynucleotide
  source 1..21: mol_type = other DNA
gtcttatcgtcacacggccca

SEQ ID NO: 4053 - protein, 7 aa, synthetic construct
  REGION 1..7: note = n-mer motif
TSQASSV

SEQ ID NO: 4054 - DNA, 21 bp, synthetic construct
  misc_feature 1..21: note = n-mer motif encoding polynucleotide
  source 1..21: mol_type = other DNA
acgtcgcaggcttcgtctgtg

SEQ ID NO: 4055 - protein, 7 aa, synthetic construct
  REGION 1..7: note = n-mer motif
NRSAGDR

SEQ ID NO: 4056 - DNA, 21 bp, synthetic construct
  misc_feature 1..21: note = n-mer motif encoding polynucleotide
  source 1..21: mol_type = other DNA
aaccgttcggctggcgaccga

SEQ ID NO: 4057 - protein, 7 aa, synthetic construct
  REGION 1..7: note = n-mer motif
RGGVTTQ

SEQ ID NO: 4058 - DNA, 21 bp, synthetic construct
  misc_feature 1..21: note = n-mer motif encoding polynucleotide
  source 1..21: mol_type = other DNA
cgaggaggagtaacaacacaa

SEQ ID NO: 4059 - protein, 7 aa, synthetic construct
  REGION 1..7: note = n-mer motif
SGLKGVN

SEQ ID NO: 4060 - DNA, 21 bp, synthetic construct
  misc_feature 1..21: note = n-mer motif encoding polynucleotide
  source 1..21: mol_type = other DNA
tccggactaaaaggtgttaac

SEQ ID NO: 4061 - protein, 7 aa, synthetic construct
  REGION 1..7: note = n-mer motif
STITNLM

SEQ ID NO: 4062 - DNA, 21 bp, synthetic construct
  misc_feature 1..21: note = n-mer motif encoding polynucleotide
  source 1..21: mol_type = other DNA
agtactattactaatctgatg

SEQ ID NO: 4063 - protein, 7 aa, synthetic construct
  REGION 1..7: note = n-mer motif
KGASVTL

SEQ ID NO: 4064 - DNA, 21 bp, synthetic construct
  misc_feature 1..21: note = n-mer motif encoding polynucleotide
  source 1..21: mol_type = other DNA
aagggggctagtgttacgctt

SEQ ID NO: 4065 - protein, 7 aa, synthetic construct
  REGION 1..7: note = n-mer motif
TSTHEGV

SEQ ID NO: 4066 - DNA, 21 bp, synthetic construct
  misc_feature 1..21: note = n-mer motif encoding polynucleotide
  source 1..21: mol_type = other DNA
acttcaacgcacgaaggagtt

SEQ ID NO: 4067 - protein, 7 aa, synthetic construct
  REGION 1..7: note = n-mer motif
KLGGGVS

SEQ ID NO: 4068 - DNA, 21 bp, synthetic construct
  misc_feature 1..21: note = n-mer motif encoding polynucleotide
  source 1..21: mol_type = other DNA
aagttgggtggtggggtgtcg

SEQ ID NO: 4069 - protein, 7 aa, synthetic construct
  REGION 1..7: note = n-mer motif
GLESRVP

SEQ ID NO: 4070 - DNA, 21 bp, synthetic construct
  misc_feature 1..21: note = n-mer motif encoding polynucleotide
  source 1..21: mol_type = other DNA
ggtttagaatcaagagtgccc

SEQ ID NO: 4071 - protein, 7 aa, synthetic construct
  REGION 1..7: note = n-mer motif
QSLSDGV

SEQ ID NO: 4072 - DNA, 21 bp, synthetic construct
  misc_feature 1..21: note = n-mer motif encoding polynucleotide
  source 1..21: mol_type = other DNA
caatcattaagcgacggcgtc

SEQ ID NO: 4073 - protein, 7 aa, synthetic construct
  REGION 1..7: note = n-mer motif
ADAAHAL

SEQ ID NO: 4074 - DNA, 21 bp, synthetic construct
  misc_feature 1..21: note = n-mer motif encoding polynucleotide
  source 1..21: mol_type = other DNA
gcggacgccgcccacgcgctt

SEQ ID NO: 4075 - protein, 7 aa, synthetic construct
  REGION 1..7: note = n-mer motif
CAGGCEL

SEQ ID NO: 4076 - DNA, 21 bp, synthetic construct
  misc_feature 1..21: note = n-mer motif encoding polynucleotide
  source 1..21: mol_type = other DNA
tgtgcgggtggttgtgagctt

SEQ ID NO: 4077 - protein, 7 aa, synthetic construct
  REGION 1..7: note = n-mer motif
PGERNNP

SEQ ID NO: 4078 - DNA, 21 bp, synthetic construct
  misc_feature 1..21: note = n-mer motif encoding polynucleotide
  source 1..21: mol_type = other DNA
ccaggagaacgtaacaacccc

SEQ ID NO: 4079 - protein, 7 aa, synthetic construct
  REGION 1..7: note = n-mer motif
GVRNTDI

SEQ ID NO: 4080 - DNA, 21 bp, synthetic construct
  misc_feature 1..21: note = n-mer motif encoding polynucleotide
  source 1..21: mol_type = other DNA
ggagttcggaacacagacatc

SEQ ID NO: 4081 - protein, 7 aa, synthetic construct
  REGION 1..7: note = n-mer motif
STLHTSI

SEQ ID NO: 4082 - DNA, 21 bp, synthetic construct
  misc_feature 1..21: note = n-mer motif encoding polynucleotide
  source 1..21: mol_type = other DNA
agtactcttcatacttcgatt

SEQ ID NO: 4083 - protein, 7 aa, synthetic construct
  REGION 1..7: note = n-mer motif
AEVGSNR

SEQ ID NO: 4084 - DNA, 21 bp, synthetic construct
  misc_feature 1..21: note = n-mer motif encoding polynucleotide
  source 1..21: mol_type = other DNA
gcagaagttggctcaaacagg

SEQ ID NO: 4085 - protein, 7 aa, synthetic construct
  REGION 1..7: note = n-mer motif
NDRNTSS

SEQ ID NO: 4086 - DNA, 21 bp, synthetic construct
  misc_feature 1..21: note = n-mer motif encoding polynucleotide
  source 1..21: mol_type = other DNA
aacgaccgaaacacatcaagt

SEQ ID NO: 4087 - protein, 7 aa, synthetic construct
  REGION 1..7: note = n-mer motif
GPVSSTK

SEQ ID NO: 4088 - DNA, 21 bp, synthetic construct
  misc_feature 1..21: note = n-mer motif encoding polynucleotide
  source 1..21: mol_type = other DNA
ggtcctgtttcttcgactaag

SEQ ID NO: 4089 - protein, 7 aa, synthetic construct
  REGION 1..7: note = n-mer motif
VHGTGGA

SEQ ID NO: 4090 - DNA, 21 bp, synthetic construct
  misc_feature 1..21: note = n-mer motif encoding polynucleotide
  source 1..21: mol_type = other DNA
gtgcatggtactgggggtgct

SEQ ID NO: 4091 - protein, 7 aa, synthetic construct
  REGION 1..7: note = n-mer motif
VLASSGP

SEQ ID NO: 4092 - DNA, 21 bp, synthetic construct
  misc_feature 1..21: note = n-mer motif encoding polynucleotide
  source 1..21: mol_type = other DNA
gtattggcaagttcgggccca

SEQ ID NO: 4093 - protein, 7 aa, synthetic construct
  REGION 1..7: note = n-mer motif
LAGSISL

SEQ ID NO: 4094 - DNA, 21 bp, synthetic construct
  misc_feature 1..21: note = n-mer motif encoding polynucleotide
  source 1..21: mol_type = other DNA
cttgctgggtcgatttcgttg

SEQ ID NO: 4095 - protein, 7 aa, synthetic construct
  REGION 1..7: note = n-mer motif
SRTLEET

SEQ ID NO: 4096 - DNA, 21 bp, synthetic construct
  misc_feature 1..21: note = n-mer motif encoding polynucleotide
  source 1..21: mol_type = other DNA
tctaggacgcttgaggagact

SEQ ID NO: 4097 - protein, 7 aa, synthetic construct
  REGION 1..7: note = n-mer motif
KEIRVSV

SEQ ID NO: 4098 - DNA, 21 bp, synthetic construct
  misc_feature 1..21: note = n-mer motif encoding polynucleotide
  source 1..21: mol_type = other DNA
aaggagattcgtgtgtcggtt

SEQ ID NO: 4099 - protein, 7 aa, synthetic construct
  REGION 1..7: note = n-mer motif
HAVAGAT

SEQ ID NO: 4100 - DNA, 21 bp, synthetic construct
  misc_feature 1..21: note = n-mer motif encoding polynucleotide
  source 1..21: mol_type = other DNA
catgctgtggctggggcgact

SEQ ID NO: 4101 - protein, 7 aa, synthetic construct
  REGION 1..7: note = n-mer motif
VDHGGVN

SEQ ID NO: 4102 - DNA, 21 bp, synthetic construct
  misc_feature 1..21: note = n-mer motif encoding polynucleotide
  source 1..21: mol_type = other DNA
gtagaccacggcggggttaac

SEQ ID NO: 4103 - protein, 7 aa, synthetic construct
  REGION 1..7: note = n-mer motif
TTATIVR

SEQ ID NO: 4104 - DNA, 21 bp, synthetic construct
  misc_feature 1..21: note = n-mer motif encoding polynucleotide
  source 1..21: mol_type = other DNA
accactgctacgatcgtacgc

SEQ ID NO: 4105 - protein, 7 aa, synthetic construct
  REGION 1..7: note = n-mer motif
SGEGLAS

SEQ ID NO: 4106 - DNA, 21 bp, synthetic construct
  misc_feature 1..21: note = n-mer motif encoding polynucleotide
  source 1..21: mol_type = other DNA
tcgggtgaggggctggctagt

SEQ ID NO: 4107 - protein, 7 aa, synthetic construct
  REGION 1..7: note = n-mer motif
TVGLTIA

SEQ ID NO: 4108 - DNA, 21 bp, synthetic construct
  misc_feature 1..21: note = n-mer motif encoding polynucleotide
  source 1..21: mol_type = other DNA
accgtaggccttactatagca

SEQ ID NO: 4109 - protein, 7 aa, synthetic construct
  REGION 1..7: note = n-mer motif
DYDSGRR

SEQ ID NO: 4110 - DNA, 21 bp, synthetic construct
  misc_feature 1..21: note = n-mer motif encoding polynucleotide
  source 1..21: mol_type = other DNA
gactacgactctggacgtaga

SEQ ID NO: 4111 - protein, 7 aa, synthetic construct
  REGION 1..7: note = n-mer motif
QGVTVGL

SEQ ID NO: 4112 - DNA, 21 bp, synthetic construct
  misc_feature 1..21: note = n-mer motif encoding polynucleotide
  source 1..21: mol_type = other DNA
cagggggttacggttgggctt

SEQ ID NO: 4113 - protein, 7 aa, synthetic construct
  REGION 1..7: note = n-mer motif
KSQSENS

SEQ ID NO: 4114 - DNA, 21 bp, synthetic construct
  misc_feature 1..21: note = n-mer motif encoding polynucleotide
  source 1..21: mol_type = other DNA
aagtcgcagtcggagaatagt

SEQ ID NO: 4115 - protein, 7 aa, synthetic construct
  REGION 1..7: note = n-mer motif
SEGLSRD

SEQ ID NO: 4116 - DNA, 21 bp, synthetic construct
  misc_feature 1..21: note = n-mer motif encoding polynucleotide
  source 1..21: mol_type = other DNA
tccgaagggctgtccagagac

SEQ ID NO: 4117 - protein, 7 aa, synthetic construct
  REGION 1..7: note = n-mer motif
SGDGTSK

SEQ ID NO: 4118 - DNA, 21 bp, synthetic construct
  misc_feature 1..21: note = n-mer motif encoding polynucleotide
  source 1..21: mol_type = other DNA
tcgggtgatgggacttctaag

SEQ ID NO: 4119 - protein, 7 aa, synthetic construct
  REGION 1..7: note = n-mer motif
DGSAGDR

SEQ ID NO: 4120 - DNA, 21 bp, synthetic construct
  misc_feature 1..21: note = n-mer motif encoding polynucleotide
  source 1..21: mol_type = other DNA
gatgggagtgcgggtgatcgt

SEQ ID NO: 4121 - protein, 7 aa, synthetic construct
  REGION 1..7: note = n-mer motif
TDALTSK

SEQ ID NO: 4122 - DNA, 21 bp, synthetic construct
  misc_feature 1..21: note = n-mer motif encoding polynucleotide
  source 1..21: mol_type = other DNA
acggacgcactcacaagcaaa

SEQ ID NO: 4123 - protein, 7 aa, synthetic construct
  REGION 1..7: note = n-mer motif
QSQTTVG

SEQ ID NO: 4124 - DNA, 21 bp, synthetic construct
  misc_feature 1..21: note = n-mer motif encoding polynucleotide
  source 1..21: mol_type = other DNA
cagtctcagacgactgttggt

SEQ ID NO: 4125 - protein, 7 aa, synthetic construct
  REGION 1..7: note = n-mer motif
GSASAVA

SEQ ID NO: 4126 - DNA, 21 bp, synthetic construct
  misc_feature 1..21: note = n-mer motif encoding polynucleotide
  source 1..21: mol_type = other DNA
ggcagcgcttcagcagtagca

SEQ ID NO: 4127 - protein, 7 aa, synthetic construct
  REGION 1..7: note = n-mer motif
VTVTMSR

SEQ ID NO: 4128 - DNA, 21 bp, synthetic construct
  misc_feature 1..21: note = n-mer motif encoding polynucleotide
  source 1..21: mol_type = other DNA
gtcacggtaaccatgtcacgg

SEQ ID NO: 4129 - protein, 7 aa, synthetic construct
  REGION 1..7: note = n-mer motif
GVGNTNI

SEQ ID NO: 4130 - DNA, 21 bp, synthetic construct
  misc_feature 1..21: note = n-mer motif encoding polynucleotide
  source 1..21: mol_type = other DNA
ggcgtaggtaacacgaacata

SEQ ID NO: 4131 - protein, 7 aa, synthetic construct
  REGION 1..7: note = n-mer motif
TIAHSQV

SEQ ID NO: 4132 - DNA, 21 bp, synthetic construct
  misc_feature 1..21: note = n-mer motif encoding polynucleotide
  source 1..21: mol_type = other DNA
acgattgctcatagtcaggtt

SEQ ID NO: 4133 - protein, 7 aa, synthetic construct
  REGION 1..7: note = n-mer motif
VQGTQTG

SEQ ID NO: 4134 - DNA, 21 bp, synthetic construct
  misc_feature 1..21: note = n-mer motif encoding polynucleotide
  source 1..21: mol_type = other DNA
gtgcagggtacgcagactggt

SEQ ID NO: 4135 - protein, 7 aa, synthetic construct
  REGION 1..7: note = n-mer motif
LRVTEIL

SEQ ID NO: 4136 - DNA, 21 bp, synthetic construct
  misc_feature 1..21: note = n-mer motif encoding polynucleotide
  source 1..21: mol_type = other DNA
cttcgagtcactgaaatacta

SEQ ID NO: 4137 - protein, 7 aa, synthetic construct
  REGION 1..7: note = n-mer motif
SSSGLVR

SEQ ID NO: 4138 - DNA, 21 bp, synthetic construct
  misc_feature 1..21: note = n-mer motif encoding polynucleotide
  source 1..21: mol_type = other DNA
agttcctctgggctagtccga

SEQ ID NO: 4139 - protein, 7 aa, synthetic construct
  REGION 1..7: note = n-mer motif
LSLSKDK

SEQ ID NO: 4140 - DNA, 21 bp, synthetic construct
  misc_feature 1..21: note = n-mer motif encoding polynucleotide
  source 1..21: mol_type = other DNA
ctatcgttatctaaagacaaa

SEQ ID NO: 4141 - protein, 7 aa, synthetic construct
  REGION 1..7: note = n-mer motif
TGISVNG

SEQ ID NO: 4142 - DNA, 21 bp, synthetic construct
  misc_feature 1..21: note = n-mer motif encoding polynucleotide
  source 1..21: mol_type = other DNA
accggcatctctgtcaacggt

SEQ ID NO: 4143 - protein, 7 aa, synthetic construct
  REGION 1..7: note = n-mer motif
SKSAFPN

SEQ ID NO: 4144 - DNA, 21 bp, synthetic construct
  misc_feature 1..21: note = n-mer motif encoding polynucleotide
  source 1..21: mol_type = other DNA
tcgaaatccgccttcccaaac

SEQ ID NO: 4145 - protein, 7 aa, synthetic construct
  REGION 1..7: note = n-mer motif
VGNSSGV

SEQ ID NO: 4146 - DNA, 21 bp, synthetic construct
  misc_feature 1..21: note = n-mer motif encoding polynucleotide
  source 1..21: mol_type = other DNA
gttggtaattcttcgggtgtg

SEQ ID NO: 4147 - protein, 7 aa, synthetic construct
  REGION 1..7: note = n-mer motif
DSHVSGD

SEQ ID NO: 4148 - DNA, 21 bp, synthetic construct
  misc_feature 1..21: note = n-mer motif encoding polynucleotide
  source 1..21: mol_type = other DNA
gactcacacgtctccggcgac

SEQ ID NO: 4149 - protein, 7 aa, synthetic construct
  REGION 1..7: note = n-mer motif
KVYDTPM

SEQ ID NO: 4150 - DNA, 21 bp, synthetic construct
  misc_feature 1..21: note = n-mer motif encoding polynucleotide
  source 1..21: mol_type = other DNA
aaggtttatgatactcctatg

SEQ ID NO: 4151 - protein, 7 aa, synthetic construct
  REGION 1..7: note = n-mer motif
GSMENVR

SEQ ID NO: 4152 - DNA, 21 bp, synthetic construct
  misc_feature 1..21: note = n-mer motif encoding polynucleotide
  source 1..21: mol_type = other DNA
gggagtatggagaatgtgcgt

SEQ ID NO: 4153 - protein, 7 aa, synthetic construct
  REGION 1..7: note = n-mer motif
ETTQGSP

SEQ ID NO: 4154 - DNA, 21 bp, synthetic construct
  misc_feature 1..21: note = n-mer motif encoding polynucleotide
  source 1..21: mol_type = other DNA
gaaacaacgcaaggcagtccc

SEQ ID NO: 4155 - protein, 7 aa, synthetic construct
  REGION 1..7: note = n-mer motif
KGSGLEI

SEQ ID NO: 4156 - DNA, 21 bp, synthetic construct
  misc_feature 1..21: note = n-mer motif encoding polynucleotide
  source 1..21: mol_type = other DNA
aaggggtctgggcttgagatt

SEQ ID NO: 4157 - protein, 7 aa, synthetic construct
  REGION 1..7: note = n-mer motif
TALQVSI

SEQ ID NO: 4158 - DNA, 21 bp, synthetic construct
  misc_feature 1..21: note = n-mer motif encoding polynucleotide
  source 1..21: mol_type = other DNA
actgcgctgcaggttagtatt

SEQ ID NO: 4159 - protein, 7 aa, synthetic construct
  REGION 1..7: note = n-mer motif
PTQSDLA

SEQ ID NO: 4160 - DNA, 21 bp, synthetic construct
  misc_feature 1..21: note = n-mer motif encoding polynucleotide
  source 1..21: mol_type = other DNA
cctacgcagtcggatcttgct

SEQ ID NO: 4161 - protein, 7 aa, synthetic construct
  REGION 1..7: note = n-mer motif
STQTLGE

SEQ ID NO: 4162 - DNA, 21 bp, synthetic construct
  misc_feature 1..21: note = n-mer motif encoding polynucleotide
  source 1..21: mol_type = other DNA
tcgactcagactttgggggag

SEQ ID NO: 4163 - protein, 7 aa, synthetic construct
  REGION 1..7: note = n-mer motif
LSNRGPV

SEQ ID NO: 4164 - DNA, 21 bp, synthetic construct
  misc_feature 1..21: note = n-mer motif encoding polynucleotide
  source 1..21: mol_type = other DNA
ctttctaacagaggcccggtg

SEQ ID NO: 4165 - protein, 7 aa, synthetic construct
  REGION 1..7: note = n-mer motif
EHVNVKV

SEQ ID NO: 4166 - DNA, 21 bp, synthetic construct
  misc_feature 1..21: note = n-mer motif encoding polynucleotide
  source 1..21: mol_type = other DNA
gagcatgttaatgtgaaggtg

SEQ ID NO: 4167 - protein, 7 aa, synthetic construct
  REGION 1..7: note = n-mer motif
PLKGGGE

SEQ ID NO: 4168 - DNA, 21 bp, synthetic construct
  misc_feature 1..21: note = n-mer motif encoding polynucleotide
  source 1..21: mol_type = other DNA
cctctgaagggtggtggggag

SEQ ID NO: 4169 - protein, 7 aa, synthetic construct
  REGION 1..7: note = n-mer motif
SHGSVSK

SEQ ID NO: 4170 - DNA, 21 bp, synthetic construct
  misc_feature 1..21: note = n-mer motif encoding polynucleotide
  source 1..21: mol_type = other DNA
tctcatggttctgtttcgaag

SEQ ID NO: 4171 - protein, 7 aa, synthetic construct
  REGION 1..7: note = n-mer motif
MLGGGVS

SEQ ID NO: 4172 - DNA, 21 bp, synthetic construct
  misc_feature 1..21: note = n-mer motif encoding polynucleotide
  source 1..21: mol_type = other DNA
atgttgggtggtggggtgtcg

SEQ ID NO: 4173 - protein, 7 aa, synthetic construct
  REGION 1..7: note = n-mer motif
TAVHSTS

SEQ ID NO: 4174 - DNA, 21 bp, synthetic construct
  misc_feature 1..21: note = n-mer motif encoding polynucleotide
  source 1..21: mol_type = other DNA
actgccgtacacagcacgtca

SEQ ID NO: 4175 - protein, 7 aa, synthetic construct
  REGION 1..7: note = n-mer motif
QADSHGR

SEQ ID NO: 4176 - DNA, 21 bp, synthetic construct
  misc_feature 1..21: note = n-mer motif encoding polynucleotide
  source 1..21: mol_type = other DNA
caagcagacagccacggccgt

SEQ ID NO: 4177 - protein, 7 aa, synthetic construct
  REGION 1..7: note = n-mer motif
ATLKPDY

SEQ ID NO: 4178 - DNA, 21 bp, synthetic construct
  misc_feature 1..21: note = n-mer motif encoding polynucleotide
  source 1..21: mol_type = other DNA
gcaacgttgaaacccgactac

SEQ ID NO: 4179 - protein, 7 aa, synthetic construct
  REGION 1..7: note = n-mer motif
LDTSARV

SEQ ID NO: 4180 - DNA, 21 bp, synthetic construct
  misc_feature 1..21: note = n-mer motif encoding polynucleotide
  source 1..21: mol_type = other DNA
cttgatactagtgctcgtgtt

SEQ ID NO: 4181 - protein, 7 aa, synthetic construct
  REGION 1..7: note = n-mer motif
HTSGTSS

SEQ ID NO: 4182 - DNA, 21 bp, synthetic construct
  misc_feature 1..21: note = n-mer motif encoding polynucleotide
  source 1..21: mol_type = other DNA
catacgagtgggacgtcgtcg

SEQ ID NO: 4183 - protein, 7 aa, synthetic construct
  REGION 1..7: note = n-mer motif
TGARDQY

SEQ ID NO: 4184 - DNA, 21 bp, synthetic construct
  misc_feature 1..21: note = n-mer motif encoding polynucleotide
  source 1..21: mol_type = other DNA
acaggggcgcgtgaccaatac

SEQ ID NO: 4185 - protein, 7 aa, synthetic construct
  REGION 1..7: note = n-mer motif
SGETLRL

SEQ ID NO: 4186 - DNA, 21 bp, synthetic construct
  misc_feature 1..21: note = n-mer motif encoding polynucleotide
  source 1..21: mol_type = other DNA
tctggggagacgcttaggctt

SEQ ID NO: 4187 - protein, 7 aa, synthetic construct
  REGION 1..7: note = n-mer motif
VSLSDGV

SEQ ID NO: 4188 - DNA, 21 bp, synthetic construct
  misc_feature 1..21: note = n-mer motif encoding polynucleotide
  source 1..21: mol_type = other DNA
gtaagcctttcggacggtgtg

SEQ ID NO: 4189 - protein, 7 aa, synthetic construct
  REGION 1..7: note = n-mer motif
AGVVNAL

SEQ ID NO: 4190 - DNA, 21 bp, synthetic construct
  misc_feature 1..21: note = n-mer motif encoding polynucleotide
  source 1..21: mol_type = other DNA
gcgggggtggtgaatgctttg

SEQ ID NO: 4191 - protein, 7 aa, synthetic construct
  REGION 1..7: note = n-mer motif
DASKLVN

SEQ ID NO: 4192 - DNA, 21 bp, synthetic construct
  misc_feature 1..21: note = n-mer motif encoding polynucleotide
  source 1..21: mol_type = other DNA
gatgcgagtaagcttgtgaat

SEQ ID NO: 4193 - protein, 7 aa, synthetic construct
  REGION 1..7: note = n-mer motif
EIRLSTH

SEQ ID NO: 4194 - DNA, 21 bp, synthetic construct
  misc_feature 1..21: note = n-mer motif encoding polynucleotide
  source 1..21: mol_type = other DNA
gaaataagactgtccacccac

SEQ ID NO: 4195 - protein, 7 aa, synthetic construct
  REGION 1..7: note = n-mer motif
MGRTDGL

SEQ ID NO: 4196 - DNA, 21 bp, synthetic construct
  misc_feature 1..21: note = n-mer motif encoding polynucleotide
  source 1..21: mol_type = other DNA
atggggcgtactgatgggttg

SEQ ID NO: 4197 - protein, 7 aa, synthetic construct
  REGION 1..7: note = n-mer motif
TGLLVSI

SEQ ID NO: 4198 - DNA, 21 bp, synthetic construct
  misc_feature 1..21: note = n-mer motif encoding polynucleotide
  source 1..21: mol_type = other DNA
actgggctgctggttagtatt

SEQ ID NO: 4199 - protein, 7 aa, synthetic construct
  REGION 1..7: note = n-mer motif
KAGLLFD

SEQ ID NO: 4200 - DNA, 21 bp, synthetic construct
  misc_feature 1..21: note = n-mer motif encoding polynucleotide
  source 1..21: mol_type = other DNA
aaagcaggccttctattcgac

SEQ ID NO: 4201 - protein, 7 aa, synthetic construct
  REGION 1..7: note = n-mer motif
SRAEGIK

SEQ ID NO: 4202 - DNA, 21 bp, synthetic construct
  misc_feature 1..21: note = n-mer motif encoding polynucleotide
  source 1..21: mol_type = other DNA
agtcgtgcggaggggattaag

SEQ ID NO: 4203 - protein, 7 aa, synthetic construct
  REGION 1..7: note = n-mer motif
NGKVDRD

SEQ ID NO: 4204 - DNA, 21 bp, synthetic construct
  misc_feature 1..21: note = n-mer motif encoding polynucleotide
  source 1..21: mol_type = other DNA
aatgggaaggttgatcgggat

SEQ ID NO: 4205 - protein, 7 aa, synthetic construct
  REGION 1..7: note = n-mer motif
SPPSSPR

SEQ ID NO: 4206 - DNA, 21 bp, synthetic construct
  misc_feature 1..21: note = n-mer motif encoding polynucleotide
  source 1..21: mol_type = other DNA
tctccgccgagttcgccgcgt

SEQ ID NO: 4207 - protein, 7 aa, synthetic construct
  REGION 1..7: note = n-mer motif
NGIAGDR

SEQ ID NO: 4208 - DNA, 21 bp, synthetic construct
  misc_feature 1..21: note = n-mer motif encoding polynucleotide
  source 1..21: mol_type = other DNA
aatgggattgcgggtgatcgt

SEQ ID NO: 4209 - protein, 7 aa, synthetic construct
  REGION 1..7: note = n-mer motif
NRASDGI

SEQ ID NO: 4210 - DNA, 21 bp, synthetic construct
  misc_feature 1..21: note = n-mer motif encoding polynucleotide
  source 1..21: mol_type = other DNA
aaccgagcttctgacgggata

SEQ ID NO: 4211 - protein, 7 aa, synthetic construct
  REGION 1..7: note = n-mer motif
GVELISR

SEQ ID NO: 4212 - DNA, 21 bp, synthetic construct
  misc_feature 1..21: note = n-mer motif encoding polynucleotide
  source 1..21: mol_type = other DNA
ggtgttgagctgatttcgcgg

SEQ ID NO: 4213 - protein, 7 aa, synthetic construct
  REGION 1..7: note = n-mer motif
RVQLSET

SEQ ID NO: 4214 - DNA, 21 bp, synthetic construct
  misc_feature 1..21: note = n-mer motif encoding polynucleotide
  source 1..21: mol_type = other DNA
cgggtgcagctgtctgagact

SEQ ID NO: 4215 - protein, 7 aa, synthetic construct
  REGION 1..7: note = n-mer motif
LNYSVSL

SEQ ID NO: 4216 - DNA, 21 bp, synthetic construct
  misc_feature 1..21: note = n-mer motif encoding polynucleotide
  source 1..21: mol_type = other DNA
ttaaactacagtgtaagcctc

SEQ ID NO: 4217 - protein, 7 aa, synthetic construct
  REGION 1..7: note = n-mer motif
ASVSSKS

SEQ ID NO: 4218 - DNA, 21 bp, synthetic construct
  misc_feature 1..21: note = n-mer motif encoding polynucleotide
  source 1..21: mol_type = other DNA
gctagtgtgtcttcgaagagt

SEQ ID NO: 4219 - protein, 7 aa, synthetic construct
  REGION 1..7: note = n-mer motif
TPSTGVL

SEQ ID NO: 4220 - DNA, 21 bp, synthetic construct
  misc_feature 1..21: note = n-mer motif encoding polynucleotide
  source 1..21: mol_type = other DNA
actcctagtactggggtgctg

SEQ ID NO: 4221 - protein, 7 aa, synthetic construct
  REGION 1..7: note = n-mer motif
HANTAGV

SEQ ID NO: 4222 - DNA, 21 bp, synthetic construct
  misc_feature 1..21: note = n-mer motif encoding polynucleotide
  source 1..21: mol_type = other DNA
cacgcaaacacagcaggtgta

SEQ ID NO: 4223 - protein, 7 aa, synthetic construct
  REGION 1..7: note = n-mer motif
VVSVLNV

SEQ ID NO: 4224 - DNA, 21 bp, synthetic construct
  misc_feature 1..21: note = n-mer motif encoding polynucleotide
  source 1..21: mol_type = other DNA
gtggtgagtgtgctgaatgtt

SEQ ID NO: 4225 - protein, 7 aa, synthetic construct
  REGION 1..7: note = n-mer motif
AHDHVKV

SEQ ID NO: 4226 - DNA, 21 bp, synthetic construct
  misc_feature 1..21: note = n-mer motif encoding polynucleotide
  source 1..21: mol_type = other DNA
gcgcatgatcatgtgaaggtg

SEQ ID NO: 4227 - protein, 7 aa, synthetic construct
  REGION 1..7: note = n-mer motif
SSEGRNV

SEQ ID NO: 4228 - DNA, 21 bp, synthetic construct
  misc_feature 1..21: note = n-mer motif encoding polynucleotide
  source 1..21: mol_type = other DNA
tcgtcagaaggaagaaacgtt

SEQ ID NO: 4229 - protein, 7 aa, synthetic construct
  REGION 1..7: note = n-mer motif
NNNGATS

SEQ ID NO: 4230 - DNA, 21 bp, synthetic construct
  misc_feature 1..21: note = n-mer motif encoding polynucleotide
  source 1..21: mol_type = other DNA
aataataatggtgcgacttct

SEQ ID NO: 4231 - protein, 7 aa, synthetic construct
  REGION 1..7: note = n-mer motif
LSQGSQQ

SEQ ID NO: 4232 - DNA, 21 bp, synthetic construct
  misc_feature 1..21: note = n-mer motif encoding polynucleotide
  source 1..21: mol_type = other DNA
ctgtctcaggggtcgcagcag

SEQ ID NO: 4233 - protein, 7 aa, synthetic construct
  REGION 1..7: note = n-mer motif
GGTTSGH

SEQ ID NO: 4234 - DNA, 21 bp, synthetic construct
  misc_feature 1..21: note = n-mer motif encoding polynucleotide
  source 1..21: mol_type = other DNA
ggcgggacaacgagcgggcac

SEQ ID NO: 4235 - protein, 7 aa, synthetic construct
  REGION 1..7: note = n-mer motif
TLASQEL

SEQ ID NO: 4236 - DNA, 21 bp, synthetic construct
  misc_feature 1..21: note = n-mer motif encoding polynucleotide
  source 1..21: mol_type = other DNA
actctggcgtcgcaggagctg

SEQ ID NO: 4237 - protein, 7 aa, synthetic construct
  REGION 1..7: note = n-mer motif
ATGTESR

SEQ ID NO: 4238 - DNA, 21 bp, synthetic construct
  misc_feature 1..21: note = n-mer motif encoding polynucleotide
  source 1..21: mol_type = other DNA
gcgactggtactgagtcgcgg

SEQ ID NO: 4239 - protein, 7 aa, synthetic construct
  REGION 1..7: note = n-mer motif
NNANLVI

SEQ ID NO: 4240 - DNA, 21 bp, synthetic construct
  misc_feature 1..21: note = n-mer motif encoding polynucleotide
  source 1..21: mol_type = other DNA
aataatgctaatctggttatt

SEQ ID NO: 4241 - protein, 7 aa, synthetic construct
  REGION 1..7: note = n-mer motif
STITTLK

SEQ ID NO: 4242 - DNA, 21 bp, synthetic construct
  misc_feature 1..21: note = n-mer motif encoding polynucleotide
  source 1..21: mol_type = other DNA
tccacaataacgacacttaaa

SEQ ID NO: 4243 - protein, 7 aa, synthetic construct
  REGION 1..7: note = n-mer motif
QLNSADS

SEQ ID NO: 4244 - DNA, 21 bp, synthetic construct
  misc_feature 1..21: note = n-mer motif encoding polynucleotide
  source 1..21: mol_type = other DNA
cagctgaattcggctgatagt

SEQ ID NO: 4245 - protein, 7 aa, synthetic construct
  REGION 1..7: note = n-mer motif
ETNFGVS

SEQ ID NO: 4246 - DNA, 21 bp, synthetic construct
  misc_feature 1..21: note = n-mer motif encoding polynucleotide
  source 1..21: mol_type = other DNA
gagactaattttggggtgtct

SEQ ID NO: 4247 - protein, 7 aa, synthetic construct
  REGION 1..7: note = n-mer motif
ENVHVKV

SEQ ID NO: 4248 - DNA, 21 bp, synthetic construct
  misc_feature 1..21: note = n-mer motif encoding polynucleotide
  source 1..21: mol_type = other DNA
gaaaacgtgcacgttaaagtc

SEQ ID NO: 4249 - protein, 7 aa, synthetic construct
  REGION 1..7: note = n-mer motif
AGGGAPM

SEQ ID NO: 4250 - DNA, 21 bp, synthetic construct
  misc_feature 1..21: note = n-mer motif encoding polynucleotide
  source 1..21: mol_type = other DNA
gccggcggaggagcacccatg

SEQ ID NO: 4251 - protein, 7 aa, synthetic construct
  REGION 1..7: note = n-mer motif
PNESVRA

SEQ ID NO: 4252 - DNA, 21 bp, synthetic construct
  misc_feature 1..21: note = n-mer motif encoding polynucleotide
  source 1..21: mol_type = other DNA
cctaacgaaagtgtacgggca

SEQ ID NO: 4253 - protein, 7 aa, synthetic construct
  REGION 1..7: note = n-mer motif
LKPGLAD

SEQ ID NO: 4254 - DNA, 21 bp, synthetic construct
  misc_feature 1..21: note = n-mer motif encoding polynucleotide
  source 1..21: mol_type = other DNA
ctgaagccggggttggcggat

SEQ ID NO: 4255 - protein, 7 aa, synthetic construct
  REGION 1..7: note = n-mer motif
LANRLSV

SEQ ID NO: 4256 - DNA, 21 bp, synthetic construct
  misc_feature 1..21: note = n-mer motif encoding polynucleotide
  source 1..21: mol_type = other DNA
ctggctaataggttgagtgtt

SEQ ID NO: 4257 - protein, 7 aa, synthetic construct
  REGION 1..7: note = n-mer motif
FAGIAQA

SEQ ID NO: 4258 - DNA, 21 bp, synthetic construct
  misc_feature 1..21: note = n-mer motif encoding polynucleotide
  source 1..21: mol_type = other DNA
tttgcggggattgcgcaggcg

SEQ ID NO: 4259 - protein, 7 aa, synthetic construct
  REGION 1..7: note = n-mer motif
RVHSAQH

SEQ ID NO: 4260 - DNA, 21 bp, synthetic construct
  misc_feature 1..21: note = n-mer motif encoding polynucleotide
  source 1..21: mol_type = other DNA
cgtgtccacagtgctcaacac

SEQ ID NO: 4261 - protein, 7 aa, synthetic construct
  REGION 1..7: note = n-mer motif
LSGLRSG

SEQ ID NO: 4262 - DNA, 21 bp, synthetic construct
  misc_feature 1..21: note = n-mer motif encoding polynucleotide
  source 1..21: mol_type = other DNA
ttgtctggtcttcgtagtggt

SEQ ID NO: 4263 - protein, 7 aa, synthetic construct
  REGION 1..7: note = n-mer motif
SEGLSRL

SEQ ID NO: 4264 - DNA, 21 bp, synthetic construct
  misc_feature 1..21: note = n-mer motif encoding polynucleotide
  source 1..21: mol_type = other DNA
tccgaaggattatcccgactt

SEQ ID NO: 4265 - protein, 7 aa, synthetic construct
  REGION 1..7: note = n-mer motif
RLLRDES

SEQ ID NO: 4266 - DNA, 21 bp, synthetic construct
  misc_feature 1..21: note = n-mer motif encoding polynucleotide
  source 1..21: mol_type = other DNA
aggttgctacgagacgaatct

SEQ ID NO: 4267 - protein, 7 aa, synthetic construct
  REGION 1..7: note = n-mer motif
SPSAIPN

SEQ ID NO: 4268 - DNA, 21 bp, synthetic construct
  misc_feature 1..21: note = n-mer motif encoding polynucleotide
  source 1..21: mol_type = other DNA
tctcccagtgcgataccgaac

SEQ ID NO: 4269 - protein, 7 aa, synthetic construct
  REGION 1..7: note = n-mer motif
VSRGAEL

SEQ ID NO: 4270 - DNA, 21 bp, synthetic construct
  misc_feature 1..21: note = n-mer motif encoding polynucleotide
  source 1..21: mol_type = other DNA
gtttcgaggggtgcggagctg

SEQ ID NO: 4271 - protein, 7 aa, synthetic construct
  REGION 1..7: note = n-mer motif
KGSDTPM

SEQ ID NO: 4272 - DNA, 21 bp, synthetic construct
  misc_feature 1..21: note = n-mer motif encoding polynucleotide
  source 1..21: mol_type = other DNA
aaaggatcggacacaccgatg

SEQ ID NO: 4273 - protein, 7 aa, synthetic construct
  REGION 1..7: note = n-mer motif
VDHGGVM

SEQ ID NO: 4274 - DNA, 21 bp, synthetic construct
  misc_feature 1..21: note = n-mer motif encoding polynucleotide
  source 1..21: mol_type = other DNA
gtggatcatggtggtgtgatg

SEQ ID NO: 4275 - protein, 7 aa, synthetic construct
  REGION 1..7: note = n-mer motif
VNAALGI

SEQ ID NO: 4276 - DNA, 21 bp, synthetic construct
  misc_feature 1..21: note = n-mer motif encoding polynucleotide
  source 1..21: mol_type = other DNA
gttaatgctgcgcttgggatt

SEQ ID NO: 4277 - protein, 7 aa, synthetic construct
  REGION 1..7: note = n-mer motif
TMSMGKL

SEQ ID NO: 4278 - DNA, 21 bp, synthetic construct
  misc_feature 1..21: note = n-mer motif encoding polynucleotide
  source 1..21: mol_type = other DNA
acgatgtcgatggggaagctg

SEQ ID NO: 4279 - protein, 7 aa, synthetic construct
  REGION 1..7: note = n-mer motif
INGGHDL

SEQ ID NO: 4280 - DNA, 21 bp, synthetic construct
  misc_feature 1..21: note = n-mer motif encoding polynucleotide
  source 1..21: mol_type = other DNA
atcaacggaggccacgacctc

SEQ ID NO: 4281 - protein, 7 aa, synthetic construct
  REGION 1..7: note = n-mer motif
GTGSTIV

SEQ ID NO: 4282 - DNA, 21 bp, synthetic construct
  misc_feature 1..21: note = n-mer motif encoding polynucleotide
  source 1..21: mol_type = other DNA
gggacgggttctacgattgtg

SEQ ID NO: 4283 - protein, 7 aa, synthetic construct
  REGION 1..7: note = n-mer motif
TNGGHVL

SEQ ID NO: 4284 - DNA, 21 bp, synthetic construct
  misc_feature 1..21: note = n-mer motif encoding polynucleotide
  source 1..21: mol_type = other DNA
actaacggcggacacgtgctc

SEQ ID NO: 4285 - protein, 7 aa, synthetic construct
  REGION 1..7: note = n-mer motif
LISSTMR

SEQ ID NO: 4286 - DNA, 21 bp, synthetic construct
  misc_feature 1..21: note = n-mer motif encoding polynucleotide
  source 1..21: mol_type = other DNA
ttgatttctagtacgatgcgt

SEQ ID NO: 4287 - protein, 7 aa, synthetic construct
  REGION 1..7: note = n-mer motif
AGGNGSY

SEQ ID NO: 4288 - DNA, 21 bp, synthetic construct
  misc_feature 1..21: note = n-mer motif encoding polynucleotide
  source 1..21: mol_type = other DNA
gcaggaggaaacggctcctac

SEQ ID NO: 4289 - protein, 7 aa, synthetic construct
  REGION 1..7: note = n-mer motif
ITQAAYV

SEQ ID NO: 4290 - DNA, 21 bp, synthetic construct
  misc_feature 1..21: note = n-mer motif encoding polynucleotide
  source 1..21: mol_type = other DNA
attacgcaggctgcttatgtt

SEQ ID NO: 4291 - protein, 7 aa, synthetic construct
  REGION 1..7: note = n-mer motif
AVLAGSM

SEQ ID NO: 4292 - DNA, 21 bp, synthetic construct
  misc_feature 1..21: note = n-mer motif encoding polynucleotide
  source 1..21: mol_type = other DNA
gcggttctggcggggtctatg

SEQ ID NO: 4293 - protein, 7 aa, synthetic construct
  REGION 1..7: note = n-mer motif
GASGAVL

SEQ ID NO: 4294 - DNA, 21 bp, synthetic construct
  misc_feature 1..21: note = n-mer motif encoding polynucleotide
  source 1..21: mol_type = other DNA
ggagcttcaggggcggtcctc

SEQ ID NO: 4295 - protein, 7 aa, synthetic construct
  REGION 1..7: note = n-mer motif
PTATESL

SEQ ID NO: 4296 - DNA, 21 bp, synthetic construct
  misc_feature 1..21: note = n-mer motif encoding polynucleotide
  source 1..21: mol_type = other DNA
cctaccgctacagaaagtctc

SEQ ID NO: 4297 - protein, 7 aa, synthetic construct
  REGION 1..7: note = n-mer motif
SPQGGLP

SEQ ID NO: 4298 - DNA, 21 bp, synthetic construct
  misc_feature 1..21: note = n-mer motif encoding polynucleotide
  source 1..21: mol_type = other DNA
tcgccgcaggggggtcttcct

SEQ ID NO: 4299 - protein, 7 aa, synthetic construct
  REGION 1..7: note = n-mer motif
VRASIVD

SEQ ID NO: 4300 - DNA, 21 bp, synthetic construct
  misc_feature 1..21: note = n-mer motif encoding polynucleotide
  source 1..21: mol_type = other DNA
gtgagggctagtattgttgat

SEQ ID NO: 4301 - protein, 7 aa, synthetic construct
  REGION 1..7: note = n-mer motif
AVKENET

SEQ ID NO: 4302 - DNA, 21 bp, synthetic construct
  misc_feature 1..21: note = n-mer motif encoding polynucleotide
  source 1..21: mol_type = other DNA
gcggtgaaggagaatgagacg

SEQ ID NO: 4303 - protein, 7 aa, synthetic construct
  REGION 1..7: note = n-mer motif
HVSQDHS

SEQ ID NO: 4304 - DNA, 21 bp, synthetic construct
  misc_feature 1..21: note = n-mer motif encoding polynucleotide
  source 1..21: mol_type = other DNA
catgtgtctcaggatcattcg

SEQ ID NO: 4305 - protein, 7 aa, synthetic construct
  REGION 1..7: note = n-mer motif
SKSNDSS

SEQ ID NO: 4306 - DNA, 21 bp, synthetic construct
  misc_feature 1..21: note = n-mer motif encoding polynucleotide
  source 1..21: mol_type = other DNA
agtaagtctaatgatagttct

SEQ ID NO: 4307 - protein, 7 aa, synthetic construct
  REGION 1..7: note = n-mer motif
KTEQVQP

SEQ ID NO: 4308 - DNA, 21 bp, synthetic construct
  misc_feature 1..21: note = n-mer motif encoding polynucleotide
  source 1..21: mol_type = other DNA
aaaacagaacaagtccaacct

SEQ ID NO: 4309 - protein, 7 aa, synthetic construct
  REGION 1..7: note = n-mer motif
MTGTAHQ

SEQ ID NO: 4310 - DNA, 21 bp, synthetic construct
  misc_feature 1..21: note = n-mer motif encoding polynucleotide
  source 1..21: mol_type = other DNA
atgacgggtacggctcatcag

SEQ ID NO: 4311 - protein, 7 aa, synthetic construct
  REGION 1..7: note = n-mer motif
IKQAVYV

SEQ ID NO: 4312 - DNA, 21 bp, synthetic construct
  misc_feature 1..21: note = n-mer motif encoding polynucleotide
  source 1..21: mol_type = other DNA
ataaaacaagcagtctacgta

SEQ ID NO: 4313 - protein, 7 aa, synthetic construct
  REGION 1..7: note = n-mer motif
IPSGGPR

SEQ ID NO: 4314 - DNA, 21 bp, synthetic construct
  misc_feature 1..21: note = n-mer motif encoding polynucleotide
  source 1..21: mol_type = other DNA
attccgtctgggggtccgcgt

SEQ ID NO: 4315 - protein, 7 aa, synthetic construct
  REGION 1..7: note = n-mer motif
TKPNMVS

SEQ ID NO: 4316 - DNA, 21 bp, synthetic construct
  misc_feature 1..21: note = n-mer motif encoding polynucleotide
  source 1..21: mol_type = other DNA
actaagccgaatatggtgagt

SEQ ID NO: 4317 - protein, 7 aa, synthetic construct
  REGION 1..7: note = n-mer motif
NDRNTSS

SEQ ID NO: 4318 - DNA, 21 bp, synthetic construct
  misc_feature 1..21: note = n-mer motif encoding polynucleotide
  source 1..21: mol_type = other DNA
aatgataggaatacgtcttcg

SEQ ID NO: 4319 - protein, 7 aa, synthetic construct
  REGION 1..7: note = n-mer motif
TGISVGK

SEQ ID NO: 4320 - DNA, 21 bp, synthetic construct
  misc_feature 1..21: note = n-mer motif encoding polynucleotide
  source 1..21: mol_type = other DNA
accgggatatcagtaggcaaa

SEQ ID NO: 4321 - protein, 7 aa, synthetic construct
  REGION 1..7: note = n-mer motif
SEQQKDW

SEQ ID NO: 4322 - DNA, 21 bp, synthetic construct
  misc_feature 1..21: note = n-mer motif encoding polynucleotide
  source 1..21: mol_type = other DNA
tctgaacaacaaaaagactgg

SEQ ID NO: 4323 - protein, 7 aa, synthetic construct
  REGION 1..7: note = n-mer motif
LLTSVKV

SEQ ID NO: 4324 - DNA, 21 bp, synthetic construct
  misc_feature 1..21: note = n-mer motif encoding polynucleotide
  source 1..21: mol_type = other DNA
ctactaacgtctgttaaagta

SEQ ID NO: 4325 - protein, 7 aa, synthetic construct
  REGION 1..7: note = n-mer motif
TTEKVTG

SEQ ID NO: 4326 - DNA, 21 bp, synthetic construct
  misc_feature 1..21: note = n-mer motif encoding polynucleotide
  source 1..21: mol_type = other DNA
acgactgagaaggttactggt

SEQ ID NO: 4327 - protein, 7 aa, synthetic construct
  REGION 1..7: note = n-mer motif
GALSTTK

SEQ ID NO: 4328 - DNA, 21 bp, synthetic construct
  misc_feature 1..21: note = n-mer motif encoding polynucleotide
  source 1..21: mol_type = other DNA
ggagcgttaagtacaaccaaa

SEQ ID NO: 4329 - protein, 7 aa, synthetic construct
  REGION 1..7: note = n-mer motif
RTLHDNT

SEQ ID NO: 4330 - DNA, 21 bp, synthetic construct
  misc_feature 1..21: note = n-mer motif encoding polynucleotide
  source 1..21: mol_type = other DNA
aggaccctccacgacaacaca

SEQ ID NO: 4331 - protein, 7 aa, synthetic construct
  REGION 1..7: note = n-mer motif
TREHNSI

SEQ ID NO: 4332 - DNA, 21 bp, synthetic construct
  misc_feature 1..21: note = n-mer motif encoding polynucleotide
  source 1..21: mol_type = other DNA
actagggagcataattcgatt

SEQ ID NO: 4333 - protein, 7 aa, synthetic construct
  REGION 1..7: note = n-mer motif
NHITGGV

SEQ ID NO: 4334 - DNA, 21 bp, synthetic construct
  misc_feature 1..21: note = n-mer motif encoding polynucleotide
  source 1..21: mol_type = other DNA
aaccacataacaggcggggtc

SEQ ID NO: 4335 - protein, 7 aa, synthetic construct
  REGION 1..7: note = n-mer motif
SQAQAGY

SEQ ID NO: 4336 - DNA, 21 bp, synthetic construct
  misc_feature 1..21: note = n-mer motif encoding polynucleotide
  source 1..21: mol_type = other DNA
tctcaggcgcaggcgggttat

SEQ ID NO: 4337 - protein, 7 aa, synthetic construct
  REGION 1..7: note = n-mer motif
NTSRIGV

SEQ ID NO: 4338 - DNA, 21 bp, synthetic construct
  misc_feature 1..21: note = n-mer motif encoding polynucleotide
  source 1..21: mol_type = other DNA
aatacgagtaggattggtgtg

SEQ ID NO: 4339 - protein, 7 aa, synthetic construct
  REGION 1..7: note = n-mer motif
HVASTAA

SEQ ID NO: 4340 - DNA, 21 bp, synthetic construct
  misc_feature 1..21: note = n-mer motif encoding polynucleotide
  source 1..21: mol_type = other DNA
cacgtagcgtcgaccgcggct

SEQ ID NO: 4341 - protein, 7 aa, synthetic construct
  REGION 1..7: note = n-mer motif
IARINSH

SEQ ID NO: 4342 - DNA, 21 bp, synthetic construct
  misc_feature 1..21: note = n-mer motif encoding polynucleotide
  source 1..21: mol_type = other DNA
atagccagaatcaactcccac

SEQ ID NO: 4343 - protein, 7 aa, synthetic construct
  REGION 1..7: note = n-mer motif
LISSTLR

SEQ ID NO: 4344 - DNA, 21 bp, synthetic construct
  misc_feature 1..21: note = n-mer motif encoding polynucleotide
  source 1..21: mol_type = other DNA
ttgatttctagtacgctgcgt

SEQ ID NO: 4345 - protein, 7 aa, synthetic construct
  REGION 1..7: note = n-mer motif
SRLENIV

SEQ ID NO: 4346 - DNA, 21 bp, synthetic construct
  misc_feature 1..21: note = n-mer motif encoding polynucleotide
  source 1..21: mol_type = other DNA
tcgcggctcgaaaacatagta

SEQ ID NO: 4347 - protein, 7 aa, synthetic construct
  REGION 1..7: note = n-mer motif
SPTSSPT

SEQ ID NO: 4348 - DNA, 21 bp, synthetic construct
  misc_feature 1..21: note = n-mer motif encoding polynucleotide
  source 1..21: mol_type = other DNA
tctccgacgagttcgccgact

SEQ ID NO: 4349 - protein, 7 aa, synthetic construct
  REGION 1..7: note = n-mer motif
HDGLGVI

SEQ ID NO: 4350 - DNA, 21 bp, synthetic construct
  misc_feature 1..21: note = n-mer motif encoding polynucleotide
  source 1..21: mol_type = other DNA
catgatggtcttggtgttatt

SEQ ID NO: 4351 - protein, 7 aa, synthetic construct
  REGION 1..7: note = n-mer motif
SDQNGPR

SEQ ID NO: 4352 - DNA, 21 bp, synthetic construct
  misc_feature 1..21: note = n-mer motif encoding polynucleotide
  source 1..21: mol_type = other DNA
tctgatcagaatgggcctcgg

SEQ ID NO: 4353 - protein, 7 aa, synthetic construct
  REGION 1..7: note = n-mer motif
SEQKNVW

SEQ ID NO: 4354 - DNA, 21 bp, synthetic construct
  misc_feature 1..21: note = n-mer motif encoding polynucleotide
  source 1..21: mol_type = other DNA
agtgagcagaagaatgtttgg

SEQ ID NO: 4355 - protein, 7 aa, synthetic construct
  REGION 1..7: note = n-mer motif
RIVVSVP

SEQ ID NO: 4356 - DNA, 21 bp, synthetic construct
  misc_feature 1..21: note = n-mer motif encoding polynucleotide
  source 1..21: mol_type = other DNA
cggatagttgtgagcgtaccc

SEQ ID NO: 4357 - protein, 7 aa, synthetic construct
  REGION 1..7: note = n-mer motif
QDGPAVK

SEQ ID NO: 4358 - DNA, 21 bp, synthetic construct
  misc_feature 1..21: note = n-mer motif encoding polynucleotide
  source 1..21: mol_type = other DNA
caggatgggcctgcggtgaag

SEQ ID NO: 4359 - protein, 7 aa, synthetic construct
  REGION 1..7: note = n-mer motif
KKVITDD

SEQ ID NO: 4360 - DNA, 21 bp, synthetic construct
  misc_feature 1..21: note = n-mer motif encoding polynucleotide
  source 1..21: mol_type = other DNA
aagaaggtgattactgatgat

SEQ ID NO: 4361 - protein, 7 aa, synthetic construct
  REGION 1..7: note = n-mer motif
MGGVNNT

SEQ ID NO: 4362 - DNA, 21 bp, synthetic construct
  misc_feature 1..21: note = n-mer motif encoding polynucleotide
  source 1..21: mol_type = other DNA
atggggggggttaataatacg

SEQ ID NO: 4363 - protein, 7 aa, synthetic construct
  REGION 1..7: note = n-mer motif
VSSKGEW

SEQ ID NO: 4364 - DNA, 21 bp, synthetic construct
  misc_feature 1..21: note = n-mer motif encoding polynucleotide
  source 1..21: mol_type = other DNA
gtcagcagcaaaggtgaatgg

SEQ ID NO: 4365 - protein, 7 aa, synthetic construct
  REGION 1..7: note = n-mer motif
GSGQMDA

SEQ ID NO: 4366 - DNA, 21 bp, synthetic construct
  misc_feature 1..21: note = n-mer motif encoding polynucleotide
  source 1..21: mol_type = other DNA
gggagtgggcagatggatgct

SEQ ID NO: 4367 - protein, 7 aa, synthetic construct
  REGION 1..7: note = n-mer motif
MAGKAPP

SEQ ID NO: 4368 - DNA, 21 bp, synthetic construct
  misc_feature 1..21: note = n-mer motif encoding polynucleotide
  source 1..21: mol_type = other DNA
atggctgggaaggcgccgccg

SEQ ID NO: 4369 - protein, 7 aa, synthetic construct
  REGION 1..7: note = n-mer motif
QVRDTMT

SEQ ID NO: 4370 - DNA, 21 bp, synthetic construct
  misc_feature 1..21: note = n-mer motif encoding polynucleotide
  source 1..21: mol_type = other DNA
caagttcgagacacaatgacc

SEQ ID NO: 4371 - protein, 7 aa, synthetic construct
  REGION 1..7: note = n-mer motif
GHVTSGD

SEQ ID NO: 4372 - DNA, 21 bp, synthetic construct
  misc_feature 1..21: note = n-mer motif encoding polynucleotide
  source 1..21: mol_type = other DNA
ggccacgtcacatctggggac

SEQ ID NO: 4373 - protein, 7 aa, synthetic construct
  REGION 1..7: note = n-mer motif
SEVSKGI

SEQ ID NO: 4374 - DNA, 21 bp, synthetic construct
  misc_feature 1..21: note = n-mer motif encoding polynucleotide
  source 1..21: mol_type = other DNA
agtgaggttagtaagggtatt

SEQ ID NO: 4375 - protein, 7 aa, synthetic construct
  REGION 1..7: note = n-mer motif
NRQEHTY

SEQ ID NO: 4376 - DNA, 21 bp, synthetic construct
  misc_feature 1..21: note = n-mer motif encoding polynucleotide
  source 1..21: mol_type = other DNA
aatcggcaggagcatacgtat

SEQ ID NO: 4377 - protein, 7 aa, synthetic construct
  REGION 1..7: note = n-mer motif
YVSTVVG

SEQ ID NO: 4378 - DNA, 21 bp, synthetic construct
  misc_feature 1..21: note = n-mer motif encoding polynucleotide
  source 1..21: mol_type = other DNA
tatgttagtactgttgtgggg

SEQ ID NO: 4379 - protein, 7 aa, synthetic construct
  REGION 1..7: note = n-mer motif
SNLSVVI

SEQ ID NO: 4380 - DNA, 21 bp, synthetic construct
  misc_feature 1..21: note = n-mer motif encoding polynucleotide
  source 1..21: mol_type = other DNA
tctaacctctcagtcgtaatc

SEQ ID NO: 4381 - protein, 7 aa, synthetic construct
  REGION 1..7: note = n-mer motif
GHPQTTA

SEQ ID NO: 4382 - DNA, 21 bp, synthetic construct
  misc_feature 1..21: note = n-mer motif encoding polynucleotide
  source 1..21: mol_type = other DNA
gggcatcctcagactacggct

SEQ ID NO: 4383 - protein, 7 aa, synthetic construct
  REGION 1..7: note = n-mer motif
ESSGNKL

SEQ ID NO: 4384 - DNA, 21 bp, synthetic construct
  misc_feature 1..21: note = n-mer motif encoding polynucleotide
  source 1..21: mol_type = other DNA
gagtctagtggtaataagctg

SEQ ID NO: 4385 - protein, 7 aa, synthetic construct
  REGION 1..7: note = n-mer motif
NFQADGL

SEQ ID NO: 4386 - DNA, 21 bp, synthetic construct
  misc_feature 1..21: note = n-mer motif encoding polynucleotide
  source 1..21: mol_type = other DNA
aacttccaagcagacggactg

SEQ ID NO: 4387 - protein, 7 aa, synthetic construct
  REGION 1..7: note = n-mer motif
GTSTLGY

SEQ ID NO: 4388 - DNA, 21 bp, synthetic construct
  misc_feature 1..21: note = n-mer motif encoding polynucleotide
  source 1..21: mol_type = other DNA
ggcacttcaaccctcggctac

SEQ ID NO: 4389 - protein, 7 aa, synthetic construct
  REGION 1..7: note = n-mer motif
MNVDGRD

SEQ ID NO: 4390 - DNA, 21 bp, synthetic construct
  misc_feature 1..21: note = n-mer motif encoding polynucleotide
  source 1..21: mol_type = other DNA
atgaatgttgatgggcgtgat

SEQ ID NO: 4391 - protein, 7 aa, synthetic construct
  REGION 1..7: note = n-mer motif
QAIEGNF

SEQ ID NO: 4392 - DNA, 21 bp, synthetic construct
  misc_feature 1..21: note = n-mer motif encoding polynucleotide
  source 1..21: mol_type = other DNA
caagccatcgaagggaacttc

SEQ ID NO: 4393 - protein, 7 aa, synthetic construct
  REGION 1..7: note = n-mer motif
KSHSENN

SEQ ID NO: 4394 - DNA, 21 bp, synthetic construct
  misc_feature 1..21: note = n-mer motif encoding polynucleotide
  source 1..21: mol_type = other DNA
aagtcgcattcggagaataat

SEQ ID NO: 4395 - protein, 7 aa, synthetic construct
  REGION 1..7: note = n-mer motif
VNYSVAL

SEQ ID NO: 4396 - DNA, 21 bp, synthetic construct
  misc_feature 1..21: note = n-mer motif encoding polynucleotide
  source 1..21: mol_type = other DNA
gtaaactacagtgttgcactc

SEQ ID NO: 4397 - protein, 7 aa, synthetic construct
  REGION 1..7: note = n-mer motif
SGSRITV

SEQ ID NO: 4398 - DNA, 21 bp, synthetic construct
  misc_feature 1..21: note = n-mer motif encoding polynucleotide
  source 1..21: mol_type = other DNA
tcgggtagtcggattactgtt

SEQ ID NO: 4399 - protein, 7 aa, synthetic construct
  REGION 1..7: note = n-mer motif
LSLNDGD

SEQ ID NO: 4400 - DNA, 21 bp, synthetic construct
  misc_feature 1..21: note = n-mer motif encoding polynucleotide
  source 1..21: mol_type = other DNA
ctatcacttaacgacggcgac

SEQ ID NO: 4401 - protein, 7 aa, synthetic construct
  REGION 1..7: note = n-mer motif
QGGNSGA

SEQ ID NO: 4402 - DNA, 21 bp, synthetic construct
  misc_feature 1..21: note = n-mer motif encoding polynucleotide
  source 1..21: mol_type = other DNA
caaggggggaactcgggcgca

SEQ ID NO: 4403 - protein, 7 aa, synthetic construct
  REGION 1..7: note = n-mer motif
LSNMLTV

SEQ ID NO: 4404 - DNA, 21 bp, synthetic construct
  misc_feature 1..21: note = n-mer motif encoding polynucleotide
  source 1..21: mol_type = other DNA
ctgtctaatatgttgactgtt

SEQ ID NO: 4405 - protein, 7 aa, synthetic construct
  REGION 1..7: note = n-mer motif
AGGGGPR

SEQ ID NO: 4406 - DNA, 21 bp, synthetic construct
  misc_feature 1..21: note = n-mer motif encoding polynucleotide
  source 1..21: mol_type = other DNA
gcaggcggaggcggaccacgt

SEQ ID NO: 4407 - protein, 7 aa, synthetic construct
  REGION 1..7: note = n-mer motif
FDKTGVH

SEQ ID NO: 4408 - DNA, 21 bp, synthetic construct
  misc_feature 1..21: note = n-mer motif encoding polynucleotide
  source 1..21: mol_type = other DNA
tttgataagacgggggtgcat

SEQ ID NO: 4409 - protein, 7 aa, synthetic construct
  REGION 1..7: note = n-mer motif
GRSQLQM

SEQ ID NO: 4410 - DNA, 21 bp, synthetic construct
  misc_feature 1..21: note = n-mer motif encoding polynucleotide
  source 1..21: mol_type = other DNA
gggcggtcgcagttgcagatg

SEQ ID NO: 4411 - protein, 7 aa, synthetic construct
  REGION 1..7: note = n-mer motif
VNAGHGI

SEQ ID NO: 4412 - DNA, 21 bp, synthetic construct
  misc_feature 1..21: note = n-mer motif encoding polynucleotide
  source 1..21: mol_type = other DNA
gttaatgctgggcatgggatt

SEQ ID NO: 4413 - protein, 7 aa, synthetic construct
  REGION 1..7: note = n-mer motif
RILQSGV

SEQ ID NO: 4414 - DNA, 21 bp, synthetic construct
  misc_feature 1..21: note = n-mer motif encoding polynucleotide
  source 1..21: mol_type = other DNA
cggatactccaatcgggtgtg

SEQ ID NO: 4415 - protein, 7 aa, synthetic construct
  REGION 1..7: note = n-mer motif
RTLGIPS

SEQ ID NO: 4416 - DNA, 21 bp, synthetic construct
  misc_feature 1..21: note = n-mer motif encoding polynucleotide
  source 1..21: mol_type = other DNA
cggacgttggggattccttct

SEQ ID NO: 4417 - protein, 7 aa, synthetic construct
  REGION 1..7: note = n-mer motif
LGGLGGL

SEQ ID NO: 4418 - DNA, 21 bp, synthetic construct
  misc_feature 1..21: note = n-mer motif encoding polynucleotide
  source 1..21: mol_type = other DNA
ctaggagggctgggaggctta

SEQ ID NO: 4419 - protein, 7 aa, synthetic construct
  REGION 1..7: note = n-mer motif
GIVGSVP

SEQ ID NO: 4420 - DNA, 21 bp, synthetic construct
  misc_feature 1..21: note = n-mer motif encoding polynucleotide
  source 1..21: mol_type = other DNA
gggattgtgggtagtgttccg

SEQ ID NO: 4421 - protein, 7 aa, synthetic construct
  REGION 1..7: note = n-mer motif
SSDRLLA

SEQ ID NO: 4422 - DNA, 21 bp, synthetic construct
  misc_feature 1..21: note = n-mer motif encoding polynucleotide
  source 1..21: mol_type = other DNA
tctagcgacagactcttagcg

SEQ ID NO: 4423 - protein, 7 aa, synthetic construct
  REGION 1..7: note = n-mer motif
KDVVRGS

SEQ ID NO: 4424 - DNA, 21 bp, synthetic construct
  misc_feature 1..21: note = n-mer motif encoding polynucleotide
  source 1..21: mol_type = other DNA
aaggatgtggtgcggggtagt

SEQ ID NO: 4425 - protein, 7 aa, synthetic construct
  REGION 1..7: note = n-mer motif
LGHSAEP

SEQ ID NO: 4426 - DNA, 21 bp, synthetic construct
  misc_feature 1..21: note = n-mer motif encoding polynucleotide
  source 1..21: mol_type = other DNA
ctgggacactcagcagaaccc

SEQ ID NO: 4427 - protein, 7 aa, synthetic construct
  REGION 1..7: note = n-mer motif
STIPNLM

SEQ ID NO: 4428 - DNA, 21 bp, synthetic construct
  misc_feature 1..21: note = n-mer motif encoding polynucleotide
  source 1..21: mol_type = other DNA
agtactattcctaatctgatg

SEQ ID NO: 4429 - protein, 7 aa, synthetic construct
  REGION 1..7: note = n-mer motif
GGTIGGH

SEQ ID NO: 4430 - DNA, 21 bp, synthetic construct
  misc_feature 1..21: note = n-mer motif encoding polynucleotide
  source 1..21: mol_type = other DNA
gggggtacgattggtggtcat

SEQ ID NO: 4431 - protein, 7 aa, synthetic construct
  REGION 1..7: note = n-mer motif
VPAGLGR

SEQ ID NO: 4432 - DNA, 21 bp, synthetic construct
  misc_feature 1..21: note = n-mer motif encoding polynucleotide
  source 1..21: mol_type = other DNA
gttcccgcaggcttaggccgt

SEQ ID NO: 4433 - protein, 7 aa, synthetic construct
  REGION 1..7: note = n-mer motif
LVHTTNN

SEQ ID NO: 4434 - DNA, 21 bp, synthetic construct
  misc_feature 1..21: note = n-mer motif encoding polynucleotide
  source 1..21: mol_type = other DNA
ctagtccacacgaccaacaac

SEQ ID NO: 4435 - protein, 7 aa, synthetic construct
  REGION 1..7: note = n-mer motif
MTSGNLM

SEQ ID NO: 4436 - DNA, 21 bp, synthetic construct
  misc_feature 1..21: note = n-mer motif encoding polynucleotide
  source 1..21: mol_type = other DNA
atgacttccggcaacctcatg

SEQ ID NO: 4437 - protein, 7 aa, synthetic construct
  REGION 1..7: note = n-mer motif
KESLSGS

SEQ ID NO: 4438 - DNA, 21 bp, synthetic construct
  misc_feature 1..21: note = n-mer motif encoding polynucleotide
  source 1..21: mol_type = other DNA
aaggagtcgctttcgggttct

SEQ ID NO: 4439 - protein, 7 aa, synthetic construct
  REGION 1..7: note = n-mer motif
LRVTEIL

SEQ ID NO: 4440 - DNA, 21 bp, synthetic construct
  misc_feature 1..21: note = n-mer motif encoding polynucleotide
  source 1..21: mol_type = other DNA
ttgcgtgtgacggagattctg

SEQ ID NO: 4441 - protein, 7 aa, synthetic construct
  REGION 1..7: note = n-mer motif
GHNVGVH

SEQ ID NO: 4442 - DNA, 21 bp, synthetic construct
  misc_feature 1..21: note = n-mer motif encoding polynucleotide
  source 1..21: mol_type = other DNA
ggtcataatgttggtgttcat

SEQ ID NO: 4443 - protein, 7 aa, synthetic construct
  REGION 1..7: note = n-mer motif
LDKVRPA

SEQ ID NO: 4444 - DNA, 21 bp, synthetic construct
  misc_feature 1..21: note = n-mer motif encoding polynucleotide
  source 1..21: mol_type = other DNA
ttggataaggtgcgtccggcg

SEQ ID NO: 4445 - protein, 7 aa, synthetic construct
  REGION 1..7: note = n-mer motif
LVANTPT

SEQ ID NO: 4446 - DNA, 21 bp, synthetic construct
  misc_feature 1..21: note = n-mer motif encoding polynucleotide
  source 1..21: mol_type = other DNA
ctcgtcgcaaacacaccaacc

SEQ ID NO: 4447 - protein, 7 aa, synthetic construct
  REGION 1..7: note = n-mer motif
SHGSDYK

SEQ ID NO: 4448 - DNA, 21 bp, synthetic construct
  misc_feature 1..21: note = n-mer motif encoding polynucleotide
  source 1..21: mol_type = other DNA
tcacacggatccgactacaaa

SEQ ID NO: 4449 - protein, 7 aa, synthetic construct
  REGION 1..7: note = n-mer motif
TVHAPGT

SEQ ID NO: 4450 - DNA, 21 bp, synthetic construct
  misc_feature 1..21: note = n-mer motif encoding polynucleotide
  source 1..21: mol_type = other DNA
accgttcacgcgccaggcact

SEQ ID NO: 4451 - protein, 7 aa, synthetic construct
  REGION 1..7: note = n-mer motif
LNGGHVM

SEQ ID NO: 4452 - DNA, 21 bp, synthetic construct
  misc_feature 1..21: note = n-mer motif encoding polynucleotide
  source 1..21: mol_type = other DNA
ctcaacggcggacacgtgatg

SEQ ID NO: 4453 - protein, 7 aa, synthetic construct
  REGION 1..7: note = n-mer motif
LTLSTGV

SEQ ID NO: 4454 - DNA, 21 bp, synthetic construct
  misc_feature 1..21: note = n-mer motif encoding polynucleotide
  source 1..21: mol_type = other DNA
cttacgctgagtactggggtg

SEQ ID NO: 4455 - protein, 7 aa, synthetic construct
  REGION 1..7: note = n-mer motif
VVQVNGR

SEQ ID NO: 4456 - DNA, 21 bp, synthetic construct
  misc_feature 1..21: note = n-mer motif encoding polynucleotide
  source 1..21: mol_type = other DNA
gttgttcaggttaatgggcgt

SEQ ID NO: 4457 - protein, 7 aa, synthetic construct
  REGION 1..7: note = n-mer motif
RNGVTSS

SEQ ID NO: 4458 - DNA, 21 bp, synthetic construct
  misc_feature 1..21: note = n-mer motif encoding polynucleotide
  source 1..21: mol_type = other DNA
agaaacggagtaacgagttcg

SEQ ID NO: 4459 - protein, 7 aa, synthetic construct
  REGION 1..7: note = n-mer motif
GSASGEA

SEQ ID NO: 4460 - DNA, 21 bp, synthetic construct
  misc_feature 1..21: note = n-mer motif encoding polynucleotide
  source 1..21: mol_type = other DNA
ggctccgcttccggagaagcc

SEQ ID NO: 4461 - protein, 7 aa, synthetic construct
  REGION 1..7: note = n-mer motif
STQAVYV

SEQ ID NO: 4462 - DNA, 21 bp, synthetic construct
  misc_feature 1..21: note = n-mer motif encoding polynucleotide
  source 1..21: mol_type = other DNA
agtacgcaggctgtttatgtt

SEQ ID NO: 4463 - protein, 7 aa, synthetic construct
  REGION 1..7: note = n-mer motif
SVDNGKR

SEQ ID NO: 4464 - DNA, 21 bp, synthetic construct
  misc_feature 1..21: note = n-mer motif encoding polynucleotide
  source 1..21: mol_type = other DNA
tcagtcgacaacggcaaacga

SEQ ID NO: 4465 - protein, 7 aa, synthetic construct
  REGION 1..7: note = n-mer motif
TLHDKVL

SEQ ID NO: 4466 - DNA, 21 bp, synthetic construct
  misc_feature 1..21: note = n-mer motif encoding polynucleotide
  source 1..21: mol_type = other DNA
actctgcatgataaggtgttg

SEQ ID NO: 4467 - protein, 7 aa, synthetic construct
  REGION 1..7: note = n-mer motif
NDVRGSN

SEQ ID NO: 4468 - DNA, 21 bp, synthetic construct
  misc_feature 1..21: note = n-mer motif encoding polynucleotide
  source 1..21: mol_type = other DNA
aacgacgtcagagggtccaac

SEQ ID NO: 4469 - protein, 7 aa, synthetic construct
  REGION 1..7: note = n-mer motif
HMNITVS

SEQ ID NO: 4470 - DNA, 21 bp, synthetic construct
  misc_feature 1..21: note = n-mer motif encoding polynucleotide
  source 1..21: mol_type = other DNA
catatgaatattacggtttcg

SEQ ID NO: 4471 - protein, 7 aa, synthetic construct
  REGION 1..7: note = n-mer motif
TTAAIIR

SEQ ID NO: 4472 - DNA, 21 bp, synthetic construct
  misc_feature 1..21: note = n-mer motif encoding polynucleotide
  source 1..21: mol_type = other DNA
acgacggcggctattattagg

SEQ ID NO: 4473 - protein, 7 aa, synthetic construct
  REGION 1..7: note = n-mer motif
VDHGGVV

SEQ ID NO: 4474 - DNA, 21 bp, synthetic construct
  misc_feature 1..21: note = n-mer motif encoding polynucleotide
  source 1..21: mol_type = other DNA
gtggatcatggtggtgtggtt

SEQ ID NO: 4475 - protein, 7 aa, synthetic construct
  REGION 1..7: note = n-mer motif
QGGYSGV

SEQ ID NO: 4476 - DNA, 21 bp, synthetic construct
  misc_feature 1..21: note = n-mer motif encoding polynucleotide
  source 1..21: mol_type = other DNA
caagggggatactctggtgtt

SEQ ID NO: 4477 - protein, 7 aa, synthetic construct
  REGION 1..7: note = n-mer motif
EPVASTI

SEQ ID NO: 4478 - DNA, 21 bp, synthetic construct
  misc_feature 1..21: note = n-mer motif encoding polynucleotide
  source 1..21: mol_type = other DNA
gagcctgtggcttctactatt

SEQ ID NO: 4479 - protein, 7 aa, synthetic construct
  REGION 1..7: note = n-mer motif
LGDTAYS

SEQ ID NO: 4480 - DNA, 21 bp, synthetic construct
  misc_feature 1..21: note = n-mer motif encoding polynucleotide
  source 1..21: mol_type = other DNA
ttaggcgacaccgcttactca

SEQ ID NO: 4481 - protein, 7 aa, synthetic construct
  REGION 1..7: note = n-mer motif
NGSAGDH

SEQ ID NO: 4482 - DNA, 21 bp, synthetic construct
  misc_feature 1..21: note = n-mer motif encoding polynucleotide
  source 1..21: mol_type = other DNA
aacggctcggctggagaccac

SEQ ID NO: 4483 - protein, 7 aa, synthetic construct
  REGION 1..7: note = n-mer motif
TAVHTTS

SEQ ID NO: 4484 - DNA, 21 bp, synthetic construct
  misc_feature 1..21: note = n-mer motif encoding polynucleotide
  source 1..21: mol_type = other DNA
accgcagttcacaccacatcc

SEQ ID NO: 4485 - protein, 7 aa, synthetic construct
  REGION 1..7: note = n-mer motif
TGARDQY

SEQ ID NO: 4486 - DNA, 21 bp, synthetic construct
  misc_feature 1..21: note = n-mer motif encoding polynucleotide
  source 1..21: mol_type = other DNA
actggtgctcgggatcagtat

SEQ ID NO: 4487 - protein, 7 aa, synthetic construct
  REGION 1..7: note = n-mer motif
NGSAGDH

SEQ ID NO: 4488 - DNA, 21 bp, synthetic construct
  misc_feature 1..21: note = n-mer motif encoding polynucleotide
  source 1..21: mol_type = other DNA
aatgggagtgcgggtgatcat

SEQ ID NO: 4489 - protein, 7 aa, synthetic construct
  REGION 1..7: note = n-mer motif
LAGMGGI

SEQ ID NO: 4490 - DNA, 21 bp, synthetic construct
  misc_feature 1..21: note = n-mer motif encoding polynucleotide
  source 1..21: mol_type = other DNA
cttgcgggtatgggggggatt

SEQ ID NO: 4491 - protein, 7 aa, synthetic construct
  REGION 1..7: note = n-mer motif
THRDAGV

SEQ ID NO: 4492 - DNA, 21 bp, synthetic construct
  misc_feature 1..21: note = n-mer motif encoding polynucleotide
  source 1..21: mol_type = other DNA
actcatagggatgctggtgtg

SEQ ID NO: 4493 - protein, 7 aa, synthetic construct
  REGION 1..7: note = n-mer motif
YREMGGS

SEQ ID NO: 4494 - DNA, 21 bp, synthetic construct
  misc_feature 1..21: note = n-mer motif encoding polynucleotide
  source 1..21: mol_type = other DNA
tacagagaaatgggcggctcc

SEQ ID NO: 4495 - protein, 7 aa, synthetic construct
  REGION 1..7: note = n-mer motif
ETNLYHA

SEQ ID NO: 4496 - DNA, 21 bp, synthetic construct
  misc_feature 1..21: note = n-mer motif encoding polynucleotide
  source 1..21: mol_type = other DNA
gagacgaatttgtatcatgct

SEQ ID NO: 4497 - protein, 7 aa, synthetic construct
  REGION 1..7: note = n-mer motif
SGANSSN

SEQ ID NO: 4498 - DNA, 21 bp, synthetic construct
  misc_feature 1..21: note = n-mer motif encoding polynucleotide
  source 1..21: mol_type = other DNA
tctggtgcgaattcgtctaat

SEQ ID NO: 4499 - protein, 7 aa, synthetic construct
  REGION 1..7: note = n-mer motif
IVNSREF

SEQ ID NO: 4500 - DNA, 21 bp, synthetic construct
  misc_feature 1..21: note = n-mer motif encoding polynucleotide
  source 1..21: mol_type = other DNA
attgtgaatagtcgtgagttt

SEQ ID NO: 4501 - protein, 7 aa, synthetic construct
  REGION 1..7: note = n-mer motif
ESLGGPR

SEQ ID NO: 4502 - DNA, 21 bp, synthetic construct
  misc_feature 1..21: note = n-mer motif encoding polynucleotide
  source 1..21: mol_type = other DNA
gaatccttgggaggccctcga

SEQ ID NO: 4503 - protein, 7 aa, synthetic construct
  REGION 1..7: note = n-mer motif
VVDSYNK

SEQ ID NO: 4504 - DNA, 21 bp, synthetic construct
  misc_feature 1..21: note = n-mer motif encoding polynucleotide
  source 1..21: mol_type = other DNA
gttgttgattcgtataataag

SEQ ID NO: 4505 - protein, 7 aa, synthetic construct
  REGION 1..7: note = n-mer motif
GGVSSTN

SEQ ID NO: 4506 - DNA, 21 bp, synthetic construct
  misc_feature 1..21: note = n-mer motif encoding polynucleotide
  source 1..21: mol_type = other DNA
ggaggagtctcgtctaccaac

SEQ ID NO: 4507 - protein, 7 aa, synthetic construct
  REGION 1..7: note = n-mer motif
DALTRLA

SEQ ID NO: 4508 - DNA, 21 bp, synthetic construct
  misc_feature 1..21: note = n-mer motif encoding polynucleotide
  source 1..21: mol_type = other DNA
gatgctctgacgcggttggcg

SEQ ID NO: 4509 - protein, 7 aa, synthetic construct
  REGION 1..7: note = n-mer motif
SLRAGVP

SEQ ID NO: 4510 - DNA, 21 bp, synthetic construct
  misc_feature 1..21: note = n-mer motif encoding polynucleotide
  source 1..21: mol_type = other DNA
agcctaagagcaggtgtaccg

SEQ ID NO: 4511 - protein, 7 aa, synthetic construct
  REGION 1..7: note = n-mer motif
MGWGTNP

SEQ ID NO: 4512 - DNA, 21 bp, synthetic construct
  misc_feature 1..21: note = n-mer motif encoding polynucleotide
  source 1..21: mol_type = other DNA
atggggtggggtactaatccg

SEQ ID NO: 4513 - protein, 7 aa, synthetic construct
  REGION 1..7: note = n-mer motif
VESGSLG

SEQ ID NO: 4514 - DNA, 21 bp, synthetic construct
  misc_feature 1..21: note = n-mer motif encoding polynucleotide
  source 1..21: mol_type = other DNA
gttgagagtggttctcttggg

SEQ ID NO: 4515 - protein, 7 aa, synthetic construct
  REGION 1..7: note = n-mer motif
QGGYSLG

SEQ ID NO: 4516 - DNA, 21 bp, synthetic construct
  misc_feature 1..21: note = n-mer motif encoding polynucleotide
  source 1..21: mol_type = other DNA
caagggggatacagcttagga

SEQ ID NO: 4517 - protein, 7 aa, synthetic construct
  REGION 1..7: note = n-mer motif
DSKDVHR

SEQ ID NO: 4518 - DNA, 21 bp, synthetic construct
  misc_feature 1..21: note = n-mer motif encoding polynucleotide
  source 1..21: mol_type = other DNA
gatagtaaggatgttcatagg

SEQ ID NO: 4519 - protein, 7 aa, synthetic construct
  REGION 1..7: note = n-mer motif
SANPVAR

SEQ ID NO: 4520 - DNA, 21 bp, synthetic construct
  misc_feature 1..21: note = n-mer motif encoding polynucleotide
  source 1..21: mol_type = other DNA
tctgcgaatccggttgcgagg

SEQ ID NO: 4521 - protein, 7 aa, synthetic construct
  REGION 1..7: note = n-mer motif
SILSGVS

SEQ ID NO: 4522 - DNA, 21 bp, synthetic construct
  misc_feature 1..21: note = n-mer motif encoding polynucleotide
  source 1..21: mol_type = other DNA
tcaatattatcaggggtatcc

SEQ ID NO: 4523 - protein, 7 aa, synthetic construct
  REGION 1..7: note = n-mer motif
HAADVQR

SEQ ID NO: 4524 - DNA, 21 bp, synthetic construct
  misc_feature 1..21: note = n-mer motif encoding polynucleotide
  source 1..21: mol_type = other DNA
catgcggcggatgtgcagagg

SEQ ID NO: 4525 - protein, 7 aa, synthetic construct
  REGION 1..7: note = n-mer motif
LSRGAEK

SEQ ID NO: 4526 - DNA, 21 bp, synthetic construct
  misc_feature 1..21: note = n-mer motif encoding polynucleotide
  source 1..21: mol_type = other DNA
ctttcgaggggtgcggagaag

SEQ ID NO: 4527 - protein, 7 aa, synthetic construct
  REGION 1..7: note = n-mer motif
AEGGAPR

SEQ ID NO: 4528 - DNA, 21 bp, synthetic construct
  misc_feature 1..21: note = n-mer motif encoding polynucleotide
  source 1..21: mol_type = other DNA
gcagaagggggcgcccctcgg

SEQ ID NO: 4529 - protein, 7 aa, synthetic construct
  REGION 1..7: note = n-mer motif
SRNGNVV

SEQ ID NO: 4530 - DNA, 21 bp, synthetic construct
  misc_feature 1..21: note = n-mer motif encoding polynucleotide
  source 1..21: mol_type = other DNA
tctcggaatgggaatgttgtt

SEQ ID NO: 4531 - protein, 7 aa, synthetic construct
  REGION 1..7: note = n-mer motif
LVATTLS

SEQ ID NO: 4532 - DNA, 21 bp, synthetic construct
  misc_feature 1..21: note = n-mer motif encoding polynucleotide
  source 1..21: mol_type = other DNA
ctggttgcaactaccctttct

SEQ ID NO: 4533 - protein, 7 aa, synthetic construct
  REGION 1..7: note = n-mer motif
AHGHVKV

SEQ ID NO: 4534 - DNA, 21 bp, synthetic construct
  misc_feature 1..21: note = n-mer motif encoding polynucleotide
  source 1..21: mol_type = other DNA
gcgcatggtcatgtgaaggtg

SEQ ID NO: 4535 - protein, 7 aa, synthetic construct
  REGION 1..7: note = n-mer motif
NAGVAQA

SEQ ID NO: 4536 - DNA, 21 bp, synthetic construct
  misc_feature 1..21: note = n-mer motif encoding polynucleotide
  source 1..21: mol_type = other DNA
aacgccggagtagcccaagca

SEQ ID NO: 4537 - protein, 7 aa, synthetic construct
  REGION 1..7: note = n-mer motif
NRDNVAF

SEQ ID NO: 4538 - DNA, 21 bp, synthetic construct
  misc_feature 1..21: note = n-mer motif encoding polynucleotide
  source 1..21: mol_type = other DNA
aatcgggataatgttgctttt

SEQ ID NO: 4539 - protein, 7 aa, synthetic construct
  REGION 1..7: note = n-mer motif
SVHSGLL

SEQ ID NO: 4540 - DNA, 21 bp, synthetic construct
  misc_feature 1..21: note = n-mer motif encoding polynucleotide
  source 1..21: mol_type = other DNA
agtgttcatagtgggctgctt

SEQ ID NO: 4541 - protein, 7 aa, synthetic construct
  REGION 1..7: note = n-mer motif
RQMGITV

SEQ ID NO: 4542 - DNA, 21 bp, synthetic construct
  misc_feature 1..21: note = n-mer motif encoding polynucleotide
  source 1..21: mol_type = other DNA
cggcagatgggtattactgtt

SEQ ID NO: 4543 - protein, 7 aa, synthetic construct
  REGION 1..7: note = n-mer motif
LSHIGGL

SEQ ID NO: 4544 - DNA, 21 bp, synthetic construct
  misc_feature 1..21: note = n-mer motif encoding polynucleotide
  source 1..21: mol_type = other DNA
ctatcacacataggaggccta

SEQ ID NO: 4545 - protein, 7 aa, synthetic construct
  REGION 1..7: note = n-mer motif
GTVTLGY

SEQ ID NO: 4546 - DNA, 21 bp, synthetic construct
  misc_feature 1..21: note = n-mer motif encoding polynucleotide
  source 1..21: mol_type = other DNA
gggacggtgactttggggtat

SEQ ID NO: 4547 - protein, 7 aa, synthetic construct
  REGION 1..7: note = n-mer motif
SYGDGGV

SEQ ID NO: 4548 - DNA, 21 bp, synthetic construct
  misc_feature 1..21: note = n-mer motif encoding polynucleotide
  source 1..21: mol_type = other DNA
tcttacggagacggaggagtg

SEQ ID NO: 4549 - protein, 7 aa, synthetic construct
  REGION 1..7: note = n-mer motif
NHVSGSS

SEQ ID NO: 4550 - DNA, 21 bp, synthetic construct
  misc_feature 1..21: note = n-mer motif encoding polynucleotide
  source 1..21: mol_type = other DNA
aatcatgtttctggtagttct

SEQ ID NO: 4551 - protein, 7 aa, synthetic construct
  REGION 1..7: note = n-mer motif
GSRALSS

SEQ ID NO: 4552 - DNA, 21 bp, synthetic construct
  misc_feature 1..21: note = n-mer motif encoding polynucleotide
  source 1..21: mol_type = other DNA
ggatcacgtgccctgtcaagt

SEQ ID NO: 4553 - protein, 7 aa, synthetic construct
  REGION 1..7: note = n-mer motif
GLNHVGL

SEQ ID NO: 4554 - DNA, 21 bp, synthetic construct
  misc_feature 1..21: note = n-mer motif encoding polynucleotide
  source 1..21: mol_type = other DNA
ggcctcaaccacgtgggcctt

SEQ ID NO: 4555 - protein, 7 aa, synthetic construct
  REGION 1..7: note = n-mer motif
TLTNGMP

SEQ ID NO: 4556 - DNA, 21 bp, synthetic construct
  misc_feature 1..21: note = n-mer motif encoding polynucleotide
  source 1..21: mol_type = other DNA
acgcttactaatgggatgcct

SEQ ID NO: 4557 - protein, 7 aa, synthetic construct
  REGION 1..7: note = n-mer motif
MGASVTH

SEQ ID NO: 4558 - DNA, 21 bp, synthetic construct
  misc_feature 1..21: note = n-mer motif encoding polynucleotide
  source 1..21: mol_type = other DNA
atgggagcgtccgtgactcac

SEQ ID NO: 4559 - protein, 7 aa, synthetic construct
  REGION 1..7: note = n-mer motif
VQQLAIK

SEQ ID NO: 4560 - DNA, 21 bp, synthetic construct
  misc_feature 1..21: note = n-mer motif encoding polynucleotide
  source 1..21: mol_type = other DNA
gtgcagcagttggcgattaag

SEQ ID NO: 4561 - protein, 7 aa, synthetic construct
  REGION 1..7: note = n-mer motif
LSNLSNG

SEQ ID NO: 4562 - DNA, 21 bp, synthetic construct
  misc_feature 1..21: note = n-mer motif encoding polynucleotide
  source 1..21: mol_type = other DNA
cttagtaatctgtcgaatggt

SEQ ID NO: 4563 - protein, 7 aa, synthetic construct
  REGION 1..7: note = n-mer motif
IAGVAQS

SEQ ID NO: 4564 - DNA, 21 bp, synthetic construct
  misc_feature 1..21: note = n-mer motif encoding polynucleotide
  source 1..21: mol_type = other DNA
atagctggagtggctcaatca

SEQ ID NO: 4565 - protein, 7 aa, synthetic construct
  REGION 1..7: note = n-mer motif
EYALTEA

SEQ ID NO: 4566 - DNA, 21 bp, synthetic construct
  misc_feature 1..21: note = n-mer motif encoding polynucleotide
  source 1..21: mol_type = other DNA
gagtatgcgttgacggaggct

SEQ ID NO: 4567 - protein, 7 aa, synthetic construct
  REGION 1..7: note = n-mer motif
AADSSGR

SEQ ID NO: 4568 - DNA, 21 bp, synthetic construct
  misc_feature 1..21: note = n-mer motif encoding polynucleotide
  source 1..21: mol_type = other DNA
gccgcagacagcagtggcagg

SEQ ID NO: 4569 - protein, 7 aa, synthetic construct
  REGION 1..7: note = n-mer motif
ILVDAHT

SEQ ID NO: 4570 - DNA, 21 bp, synthetic construct
  misc_feature 1..21: note = n-mer motif encoding polynucleotide
  source 1..21: mol_type = other DNA
atcctagtggacgcgcacaca

SEQ ID NO: 4571 - protein, 7 aa, synthetic construct
  REGION 1..7: note = n-mer motif
ADVHVRL

SEQ ID NO: 4572 - DNA, 21 bp, synthetic construct
  misc_feature 1..21: note = n-mer motif encoding polynucleotide
  source 1..21: mol_type = other DNA
gctgatgtgcatgtgcgtttg

SEQ ID NO: 4573 - protein, 7 aa, synthetic construct
  REGION 1..7: note = n-mer motif
YVQAVPS

SEQ ID NO: 4574 - DNA, 21 bp, synthetic construct
  misc_feature 1..21: note = n-mer motif encoding polynucleotide
  source 1..21: mol_type = other DNA
tatgtgcaggcggttccttct

SEQ ID NO: 4575 - protein, 7 aa, synthetic construct
  REGION 1..7: note = n-mer motif
ALAQNNM

SEQ ID NO: 4576 - DNA, 21 bp, synthetic construct
  misc_feature 1..21: note = n-mer motif encoding polynucleotide
  source 1..21: mol_type = other DNA
gccttagcccaaaacaacatg

SEQ ID NO: 4577 - protein, 7 aa, synthetic construct
  REGION 1..7: note = n-mer motif
QGGDSGG

SEQ ID NO: 4578 - DNA, 21 bp, synthetic construct
  misc_feature 1..21: note = n-mer motif encoding polynucleotide
  source 1..21: mol_type = other DNA
caaggcggagactcgggtggg

SEQ ID NO: 4579 - protein, 7 aa, synthetic construct
  REGION 1..7: note = n-mer motif
RVEISAK

SEQ ID NO: 4580 - DNA, 21 bp, synthetic construct
  misc_feature 1..21: note = n-mer motif encoding polynucleotide
  source 1..21: mol_type = other DNA
agggttgagatttctgcgaag

SEQ ID NO: 4581 - protein, 7 aa, synthetic construct
  REGION 1..7: note = n-mer motif
LGRVEHT

SEQ ID NO: 4582 - DNA, 21 bp, synthetic construct
  misc_feature 1..21: note = n-mer motif encoding polynucleotide
  source 1..21: mol_type = other DNA
ttaggcagagtggaacacact

SEQ ID NO: 4583 - protein, 7 aa, synthetic construct
  REGION 1..7: note = n-mer motif
PTQGTVR

SEQ ID NO: 4584 - DNA, 21 bp, synthetic construct
  misc_feature 1..21: note = n-mer motif encoding polynucleotide
  source 1..21: mol_type = other DNA
cccacacaaggcacagtccgt

SEQ ID NO: 4585 - protein, 7 aa, synthetic construct
  REGION 1..7: note = n-mer motif
PTQGTFR

SEQ ID NO: 4586 - DNA, 21 bp, synthetic construct
  misc_feature 1..21: note = n-mer motif encoding polynucleotide
  source 1..21: mol_type = other DNA
ccgacacaaggaacattcagg

SEQ ID NO: 4587 - protein, 7 aa, synthetic construct
  REGION 1..7: note = n-mer motif
PSQGTLR

SEQ ID NO: 4588 - DNA, 21 bp, synthetic construct
  misc_feature 1..21: note = n-mer motif encoding polynucleotide
  source 1..21: mol_type = other DNA
ccttctcaggggacgcttcgg

SEQ ID NO: 4589 - protein, 7 aa, synthetic construct
  REGION 1..7: note = n-mer motif
NLGAALS

SEQ ID NO: 4590 - DNA, 21 bp, synthetic construct
  misc_feature 1..21: note = n-mer motif encoding polynucleotide
  source 1..21: mol_type = other DNA
aaccttggggctgccctatcg

SEQ ID NO: 4591 - protein, 7 aa, synthetic construct
  REGION 1..7: note = n-mer motif
PKPSHGE

SEQ ID NO: 4592 - DNA, 21 bp, synthetic construct
  misc_feature 1..21: note = n-mer motif encoding polynucleotide
  source 1..21: mol_type = other DNA
cctaaaccatctcacggagaa

SEQ ID NO: 4593 - protein, 7 aa, synthetic construct
  REGION 1..7: note = n-mer motif
PTPGTLR

SEQ ID NO: 4594 - DNA, 21 bp, synthetic construct
  misc_feature 1..21: note = n-mer motif encoding polynucleotide
  source 1..21: mol_type = other DNA
cctactccggggacgcttcgg

SEQ ID NO: 4595 - protein, 7 aa, synthetic construct
  REGION 1..7: note = n-mer motif
PTQGTLR

SEQ ID NO: 4596 - DNA, 21 bp, synthetic construct
  misc_feature 1..21: note = n-mer motif encoding polynucleotide
  source 1..21: mol_type = other DNA
cctactcaggggacgcttcgg

SEQ ID NO: 4597 - protein, 7 aa, synthetic construct
  REGION 1..7: note = n-mer motif
QDGPAVK

SEQ ID NO: 4598 - DNA, 21 bp, synthetic construct
  misc_feature 1..21: note = n-mer motif encoding polynucleotide
  source 1..21: mol_type = other DNA
caggatgggcctgcggtgaag

SEQ ID NO: 4599 - protein, 7 aa, synthetic construct
  REGION 1..7: note = n-mer motif
PNQGTLR

SEQ ID NO: 4600 - DNA, 21 bp, synthetic construct
  misc_feature 1..21: note = n-mer motif encoding polynucleotide
  source 1..21: mol_type = other DNA
ccaaaccaaggtactctacga

SEQ ID NO: 4601 - protein, 7 aa, synthetic construct
  REGION 1..7: note = n-mer motif
ESLAGVR

SEQ ID NO: 4602 - DNA, 21 bp, synthetic construct
  misc_feature 1..21: note = n-mer motif encoding polynucleotide
  source 1..21: mol_type = other DNA
gaatcgttggcaggggtgcgt

SEQ ID NO: 4603 - protein, 7 aa, synthetic construct
  REGION 1..7: note = n-mer motif
AADSSAR

SEQ ID NO: 4604 - DNA, 21 bp, synthetic construct
  misc_feature 1..21: note = n-mer motif encoding polynucleotide
  source 1..21: mol_type = other DNA
gccgctgactcatcggcccgt

SEQ ID NO: 4605 - protein, 7 aa, synthetic construct
  REGION 1..7: note = n-mer motif
SHGSDPK

SEQ ID NO: 4606 - DNA, 21 bp, synthetic construct
  misc_feature 1..21: note = n-mer motif encoding polynucleotide
  source 1..21: mol_type = other DNA
tctcatggttctgatccgaag

SEQ ID NO: 4607 - protein, 7 aa, synthetic construct
  REGION 1..7: note = n-mer motif
AAGVIPN

SEQ ID NO: 4608 - DNA, 21 bp, synthetic construct
  misc_feature 1..21: note = n-mer motif encoding polynucleotide
  source 1..21: mol_type = other DNA
gccgccggagtgatacctaac

SEQ ID NO: 4609 - protein, 7 aa, synthetic construct
  REGION 1..7: note = n-mer motif
KNPGVDT

SEQ ID NO: 4610 - DNA, 21 bp, synthetic construct
  misc_feature 1..21: note = n-mer motif encoding polynucleotide
  source 1..21: mol_type = other DNA
aaaaaccctggagttgacacg

SEQ ID NO: 4611 - protein, 7 aa, synthetic construct
  REGION 1..7: note = n-mer motif
PAQGTLR

SEQ ID NO: 4612 - DNA, 21 bp, synthetic construct
  misc_feature 1..21: note = n-mer motif encoding polynucleotide
  source 1..21: mol_type = other DNA
ccggcgcaaggaacactacga

SEQ ID NO: 4613 - protein, 7 aa, synthetic construct
  REGION 1..7: note = n-mer motif
GRSQLPM

SEQ ID NO: 4614 - DNA, 21 bp, synthetic construct
  misc_feature 1..21: note = n-mer motif encoding polynucleotide
  source 1..21: mol_type = other DNA
ggccgatcacaacttccaatg

SEQ ID NO: 4615 - protein, 7 aa, synthetic construct
  REGION 1..7: note = n-mer motif
VTTLSPV

SEQ ID NO: 4616 - DNA, 21 bp, synthetic construct
  misc_feature 1..21: note = n-mer motif encoding polynucleotide
  source 1..21: mol_type = other DNA
gtcacgactttgagtccagtt

SEQ ID NO: 4617 - protein, 7 aa, synthetic construct
  REGION 1..7: note = n-mer motif
HSEGVGR

SEQ ID NO: 4618 - DNA, 21 bp, synthetic construct
  misc_feature 1..21: note = n-mer motif encoding polynucleotide
  source 1..21: mol_type = other DNA
cactcggaaggagtcggacgc

SEQ ID NO: 4619 - protein, 7 aa, synthetic construct
  REGION 1..7: note = n-mer motif
SHGYDSK

SEQ ID NO: 4620 - DNA, 21 bp, synthetic construct
  misc_feature 1..21: note = n-mer motif encoding polynucleotide
  source 1..21: mol_type = other DNA
tctcatggttatgattcgaag

SEQ ID NO: 4621 - protein, 7 aa, synthetic construct
  REGION 1..7: note = n-mer motif
NQLGELV

SEQ ID NO: 4622 - DNA, 21 bp, synthetic construct
  misc_feature 1..21: note = n-mer motif encoding polynucleotide
  source 1..21: mol_type = other DNA
aaccaactcggcgaactagtg

SEQ ID NO: 4623 - protein, 7 aa, synthetic construct
  REGION 1..7: note = n-mer motif
NGMGDVT

SEQ ID NO: 4624 - DNA, 21 bp, synthetic construct
  misc_feature 1..21: note = n-mer motif encoding polynucleotide
  source 1..21: mol_type = other DNA
aacggcatgggggacgttact

SEQ ID NO: 4625 - protein, 7 aa, synthetic construct
  REGION 1..7: note = n-mer motif
VGGNVVH

SEQ ID NO: 4626 - DNA, 21 bp, synthetic construct
  misc_feature 1..21: note = n-mer motif encoding polynucleotide
  source 1..21: mol_type = other DNA
gttggtggtaatgttgttcat

SEQ ID NO: 4627 - protein, 7 aa, synthetic construct
  REGION 1..7: note = n-mer motif
LVTGMSS

SEQ ID NO: 4628 - DNA, 21 bp, synthetic construct
  misc_feature 1..21: note = n-mer motif encoding polynucleotide
  source 1..21: mol_type = other DNA
cttgttactgggatgagttct

SEQ ID NO: 4629 - protein, 7 aa, synthetic construct
  REGION 1..7: note = n-mer motif
MNVGHVL

SEQ ID NO: 4630 - DNA, 21 bp, synthetic construct
  misc_feature 1..21: note = n-mer motif encoding polynucleotide
  source 1..21: mol_type = other DNA
atgaatgtgggtcatgttctg

SEQ ID NO: 4631 - protein, 7 aa, synthetic construct
  REGION 1..7: note = n-mer motif
MSISEPR

SEQ ID NO: 4632 - DNA, 21 bp, synthetic construct
  misc_feature 1..21: note = n-mer motif encoding polynucleotide
  source 1..21: mol_type = other DNA
atgtctattagtgagccgcgg

SEQ ID NO: 4633 - protein, 7 aa, synthetic construct
  REGION 1..7: note = n-mer motif
ALGDALR

SEQ ID NO: 4634 - DNA, 21 bp, synthetic construct
  misc_feature 1..21: note = n-mer motif encoding polynucleotide
  source 1..21: mol_type = other DNA
gcactaggcgacgcattacgc

SEQ ID NO: 4635 - protein, 7 aa, synthetic construct
  REGION 1..7: note = n-mer motif
QYAVSGG

SEQ ID NO: 4636 - DNA, 21 bp, synthetic construct
  misc_feature 1..21: note = n-mer motif encoding polynucleotide
  source 1..21: mol_type = other DNA
caatacgcagtgagcggcggt

SEQ ID NO: 4637 - protein, 7 aa, synthetic construct
  REGION 1..7: note = n-mer motif
VLASLGP

SEQ ID NO: 4638 - DNA, 21 bp, synthetic construct
  misc_feature 1..21: note = n-mer motif encoding polynucleotide
  source 1..21: mol_type = other DNA
gttctggcttcgcttggtcct

SEQ ID NO: 4639 - protein, 7 aa, synthetic construct
  REGION 1..7: note = n-mer motif
GRDLTPA

SEQ ID NO: 4640 - DNA, 21 bp, synthetic construct
  misc_feature 1..21: note = n-mer motif encoding polynucleotide
  source 1..21: mol_type = other DNA
ggtcgggatcttacgcctgct

SEQ ID NO: 4641 - protein, 7 aa, synthetic construct
  REGION 1..7: note = n-mer motif
RIVDSVP

SEQ ID NO: 4642 - DNA, 21 bp, synthetic construct
  misc_feature 1..21: note = n-mer motif encoding polynucleotide
  source 1..21: mol_type = other DNA
aggattgtggatagtgttccg

SEQ ID NO: 4643 - protein, 7 aa, synthetic construct
  REGION 1..7: note = n-mer motif
VDHGGVV

SEQ ID NO: 4644 - DNA, 21 bp, synthetic construct
  misc_feature 1..21: note = n-mer motif encoding polynucleotide
  source 1..21: mol_type = other DNA
gtggatcatggtggtgtggtt

SEQ ID NO: 4645 - protein, 7 aa, synthetic construct
  REGION 1..7: note = n-mer motif
ASDAVLR

SEQ ID NO: 4646 - DNA, 21 bp, synthetic construct
  misc_feature 1..21: note = n-mer motif encoding polynucleotide
  source 1..21: mol_type = other DNA
gcatccgacgccgtcctaagg

SEQ ID NO: 4647 - protein, 7 aa, synthetic construct
  REGION 1..7: note = n-mer motif
ILVDAYA

SEQ ID NO: 4648 - DNA, 21 bp, synthetic construct
  misc_feature 1..21: note = n-mer motif encoding polynucleotide
  source 1..21: mol_type = other DNA
atactagtagacgcgtacgct

SEQ ID NO: 4649 - protein, 7 aa, synthetic construct
  REGION 1..7: note = n-mer motif
PTEGTLR

SEQ ID NO: 4650 - DNA, 21 bp, synthetic construct
  misc_feature 1..21: note = n-mer motif encoding polynucleotide
  source 1..21: mol_type = other DNA
ccgacagaaggcacactgcga

SEQ ID NO: 4651 - protein, 7 aa, synthetic construct
  REGION 1..7: note = n-mer motif
TDALTTK

SEQ ID NO: 4652 - DNA, 21 bp, synthetic construct
  misc_feature 1..21: note = n-mer motif encoding polynucleotide
  source 1..21: mol_type = other DNA
actgatgcgcttacgactaag

SEQ ID NO: 4653 - protein, 7 aa, synthetic construct
  REGION 1..7: note = n-mer motif
RVDSEKL

SEQ ID NO: 4654 - DNA, 21 bp, synthetic construct
  misc_feature 1..21: note = n-mer motif encoding polynucleotide
  source 1..21: mol_type = other DNA
agggtggattcggagaagctt

SEQ ID NO: 4655 - protein, 7 aa, synthetic construct
  REGION 1..7: note = n-mer motif
KNPGVDS

SEQ ID NO: 4656 - DNA, 21 bp, synthetic construct
  misc_feature 1..21: note = n-mer motif encoding polynucleotide
  source 1..21: mol_type = other DNA
aagaatccgggggtggattct

SEQ ID NO: 4657 - protein, 7 aa, synthetic construct
  REGION 1..7: note = n-mer motif
RTDGADH

SEQ ID NO: 4658 - DNA, 21 bp, synthetic construct
  misc_feature 1..21: note = n-mer motif encoding polynucleotide
  source 1..21: mol_type = other DNA
cgcacagacggagcagaccac

SEQ ID NO: 4659 - protein, 7 aa, synthetic construct
  REGION 1..7: note = n-mer motif
LSSTDGV

SEQ ID NO: 4660 - DNA, 21 bp, synthetic construct
  misc_feature 1..21: note = n-mer motif encoding polynucleotide
  source 1..21: mol_type = other DNA
ctgagttcgactgatggggtt

SEQ ID NO: 4661 - protein, 7 aa, synthetic construct
  REGION 1..7: note = n-mer motif
AVFSSQK

SEQ ID NO: 4662 - DNA, 21 bp, synthetic construct
  misc_feature 1..21: note = n-mer motif encoding polynucleotide
  source 1..21: mol_type = other DNA
gctgtattctccagtcaaaaa

SEQ ID NO: 4663 - protein, 7 aa, synthetic construct
  REGION 1..7: note = n-mer motif
TVITGAP

SEQ ID NO: 4664 - DNA, 21 bp, synthetic construct
  misc_feature 1..21: note = n-mer motif encoding polynucleotide
  source 1..21: mol_type = other DNA
actgtgatcactggcgccccc

SEQ ID NO: 4665 - protein, 7 aa, synthetic construct
  REGION 1..7: note = n-mer motif
LESAAMI

SEQ ID NO: 4666 - DNA, 21 bp, synthetic construct
  misc_feature 1..21: note = n-mer motif encoding polynucleotide
  source 1..21: mol_type = other DNA
ctggagtcggctgctatgatt

SEQ ID NO: 4667 - protein, 7 aa, synthetic construct
  REGION 1..7: note = n-mer motif
RVLTSDV

SEQ ID NO: 4668 - DNA, 21 bp, synthetic construct
  misc_feature 1..21: note = n-mer motif encoding polynucleotide
  source 1..21: mol_type = other DNA
cgtgttctgacgtctgatgtg

SEQ ID NO: 4669 - protein, 7 aa, synthetic construct
  REGION 1..7: note = n-mer motif
PEPRSSY

SEQ ID NO: 4670 - DNA, 21 bp, synthetic construct
  misc_feature 1..21: note = n-mer motif encoding polynucleotide
  source 1..21: mol_type = other DNA
cctgagccgcgtagtagttat

SEQ ID NO: 4671 - protein, 7 aa, synthetic construct
  REGION 1..7: note = n-mer motif
ESRNDVV

SEQ ID NO: 4672 - DNA, 21 bp, synthetic construct
  misc_feature 1..21: note = n-mer motif encoding polynucleotide
  source 1..21: mol_type = other DNA
gagtcgaggaatgatgttgtt

SEQ ID NO: 4673 - protein, 7 aa, synthetic construct
  REGION 1..7: note = n-mer motif
RHIADAS

SEQ ID NO: 4674 - DNA, 21 bp, synthetic construct
  misc_feature 1..21: note = n-mer motif encoding polynucleotide
  source 1..21: mol_type = other DNA
agacacatagcggacgcgtcg

SEQ ID NO: 4675 - protein, 7 aa, synthetic construct
  REGION 1..7: note = n-mer motif
HAAGASS

SEQ ID NO: 4676 - DNA, 21 bp, synthetic construct
  misc_feature 1..21: note = n-mer motif encoding polynucleotide
  source 1..21: mol_type = other DNA
catgcggcgggtgctagtagt

SEQ ID NO: 4677 - protein, 7 aa, synthetic construct
  REGION 1..7: note = n-mer motif
HTLSTGV

SEQ ID NO: 4678 - DNA, 21 bp, synthetic construct
  misc_feature 1..21: note = n-mer motif encoding polynucleotide
  source 1..21: mol_type = other DNA
cacaccctaagcacgggagta

SEQ ID NO: 4679 - protein, 7 aa, synthetic construct
  REGION 1..7: note = n-mer motif
TVADPRA

SEQ ID NO: 4680 - DNA, 21 bp, synthetic construct
  misc_feature 1..21: note = n-mer motif encoding polynucleotide
  source 1..21: mol_type = other DNA
actgttgcggatccgcgggcg

SEQ ID NO: 4681 - protein, 7 aa, synthetic construct
  REGION 1..7: note = n-mer motif
SAGGSLQ

SEQ ID NO: 4682 - DNA, 21 bp, synthetic construct
  misc_feature 1..21: note = n-mer motif encoding polynucleotide
  source 1..21: mol_type = other DNA
agtgctggtgggagtcttcag

SEQ ID NO: 4683 - protein, 7 aa, synthetic construct
  REGION 1..7: note = n-mer motif
MANMLSV

SEQ ID NO: 4684 - DNA, 21 bp, synthetic construct
  misc_feature 1..21: note = n-mer motif encoding polynucleotide
  source 1..21: mol_type = other DNA
atggcgaacatgttatcggtg

SEQ ID NO: 4685 - protein, 7 aa, synthetic construct
  REGION 1..7: note = n-mer motif
SLGEGRH

SEQ ID NO: 4686 - DNA, 21 bp, synthetic construct
  misc_feature 1..21: note = n-mer motif encoding polynucleotide
  source 1..21: mol_type = other DNA
agtttaggcgaagggcgtcac

SEQ ID NO: 4687 - protein, 7 aa, synthetic construct
  REGION 1..7: note = n-mer motif
RESLEAL

SEQ ID NO: 4688 - DNA, 21 bp, synthetic construct
  misc_feature 1..21: note = n-mer motif encoding polynucleotide
  source 1..21: mol_type = other DNA
agggagagtcttgaggcgttg

SEQ ID NO: 4689 - protein, 7 aa, synthetic construct
  REGION 1..7: note = n-mer motif
LAGLGGP

SEQ ID NO: 4690 - DNA, 21 bp, synthetic construct
  misc_feature 1..21: note = n-mer motif encoding polynucleotide
  source 1..21: mol_type = other DNA
cttgcgggtttgggggggcct

SEQ ID NO: 4691 - protein, 7 aa, synthetic construct
  REGION 1..7: note = n-mer motif
LSLNDVV

SEQ ID NO: 4692 - DNA, 21 bp, synthetic construct
  misc_feature 1..21: note = n-mer motif encoding polynucleotide
  source 1..21: mol_type = other DNA
ctgagtttgaatgatgtggtt

SEQ ID NO: 4693 - protein, 7 aa, synthetic construct
  REGION 1..7: note = n-mer motif
ATDSSVR

SEQ ID NO: 4694 - DNA, 21 bp, synthetic construct
  misc_feature 1..21: note = n-mer motif encoding polynucleotide
  source 1..21: mol_type = other DNA
gccaccgacagcagtgtccgt

SEQ ID NO: 4695 - protein, 7 aa, synthetic construct
  REGION 1..7: note = n-mer motif
STINTLM

SEQ ID NO: 4696 - DNA, 21 bp, synthetic construct
  misc_feature 1..21: note = n-mer motif encoding polynucleotide
  source 1..21: mol_type = other DNA
agtactattaatactctgatg

SEQ ID NO: 4697 - protein, 7 aa, synthetic construct
  REGION 1..7: note = n-mer motif
LSRDVAV

SEQ ID NO: 4698 - DNA, 21 bp, synthetic construct
  misc_feature 1..21: note = n-mer motif encoding polynucleotide
  source 1..21: mol_type = other DNA
ttgtcgagggatgtggcggtt

SEQ ID NO: 4699 - protein, 7 aa, synthetic construct
  REGION 1..7: note = n-mer motif
QYVVSGA

SEQ ID NO: 4700 - DNA, 21 bp, synthetic construct
  misc_feature 1..21: note = n-mer motif encoding polynucleotide
  source 1..21: mol_type = other DNA
cagtatgttgttagtggtgcg

SEQ ID NO: 4701 - protein, 7 aa, synthetic construct
  REGION 1..7: note = n-mer motif
LIGAALD

SEQ ID NO: 4702 - DNA, 21 bp, synthetic construct
  misc_feature 1..21: note = n-mer motif encoding polynucleotide
  source 1..21: mol_type = other DNA
ctaatcggcgcagcactcgac

SEQ ID NO: 4703 - protein, 7 aa, synthetic construct
  REGION 1..7: note = n-mer motif
TMANSER

SEQ ID NO: 4704 - DNA, 21 bp, synthetic construct
  misc_feature 1..21: note = n-mer motif encoding polynucleotide
  source 1..21: mol_type = other DNA
acgatggcaaactcggaacgc

SEQ ID NO: 4705 - protein, 7 aa, synthetic construct
  REGION 1..7: note = n-mer motif
GINEHVA

SEQ ID NO: 4706 - DNA, 21 bp, synthetic construct
  misc_feature 1..21: note = n-mer motif encoding polynucleotide
  source 1..21: mol_type = other DNA
gggatcaacgaacacgtagcc

SEQ ID NO: 4707 - protein, 7 aa, synthetic construct
  REGION 1..7: note = n-mer motif
SNLGETV

SEQ ID NO: 4708 - DNA, 21 bp, synthetic construct
  misc_feature 1..21: note = n-mer motif encoding polynucleotide
  source 1..21: mol_type = other DNA
tcgaatttgggggagacggtt

SEQ ID NO: 4709 - protein, 7 aa, synthetic construct
  REGION 1..7: note = n-mer motif
GARMVMT

SEQ ID NO: 4710 - DNA, 21 bp, synthetic construct
  misc_feature 1..21: note = n-mer motif encoding polynucleotide
  source 1..21: mol_type = other DNA
ggtgcgcggatggttatgact

SEQ ID NO: 4711 - protein, 7 aa, synthetic construct
  REGION 1..7: note = n-mer motif
AMGGETA

SEQ ID NO: 4712 - DNA, 21 bp, synthetic construct
  misc_feature 1..21: note = n-mer motif encoding polynucleotide
  source 1..21: mol_type = other DNA
gcgatgggtggtgagactgct

SEQ ID NO: 4713 - protein, 7 aa, synthetic construct
  REGION 1..7: note = n-mer motif
PTHGTLR

SEQ ID NO: 4714 - DNA, 21 bp, synthetic construct
  misc_feature 1..21: note = n-mer motif encoding polynucleotide
  source 1..21: mol_type = other DNA
ccgacccacggtacactgcga

SEQ ID NO: 4715 - protein, 7 aa, synthetic construct
  REGION 1..7: note = n-mer motif
LNGVTIT

SEQ ID NO: 4716 - DNA, 21 bp, synthetic construct
  misc_feature 1..21: note = n-mer motif encoding polynucleotide
  source 1..21: mol_type = other DNA
ctcaacggcgtcaccatcacc

SEQ ID NO: 4717 - protein, 7 aa, synthetic construct
  REGION 1..7: note = n-mer motif
SVSHVVV

SEQ ID NO: 4718 - DNA, 21 bp, synthetic construct
  misc_feature 1..21: note = n-mer motif encoding polynucleotide
  source 1..21: mol_type = other DNA
tcggtctctcacgtcgtcgta

SEQ ID NO: 4719 - protein, 7 aa, synthetic construct
  REGION 1..7: note = n-mer motif
DVVLLTR

SEQ ID NO: 4720 - DNA, 21 bp, synthetic construct
  misc_feature 1..21: note = n-mer motif encoding polynucleotide
  source 1..21: mol_type = other DNA
gatgttgttttgttgactagg

SEQ ID NO: 4721 - protein, 7 aa, synthetic construct
  REGION 1..7: note = n-mer motif
VGLLATV

SEQ ID NO: 4722 - DNA, 21 bp, synthetic construct
  misc_feature 1..21: note = n-mer motif encoding polynucleotide
  source 1..21: mol_type = other DNA
gtcggtctccttgcaacagtg

SEQ ID NO: 4723 - protein, 7 aa, synthetic construct
  REGION 1..7: note = n-mer motif
ASESSTR

SEQ ID NO: 4724 - DNA, 21 bp, synthetic construct
  misc_feature 1..21: note = n-mer motif encoding polynucleotide
  source 1..21: mol_type = other DNA
gcatctgaaagctcaacacgg

SEQ ID NO: 4725 - protein, 7 aa, synthetic construct
  REGION 1..7: note = n-mer motif
RVGSSED

SEQ ID NO: 4726 - DNA, 21 bp, synthetic construct
  misc_feature 1..21: note = n-mer motif encoding polynucleotide
  source 1..21: mol_type = other DNA
cgggttgggagctccgaagac

SEQ ID NO: 4727 - protein, 7 aa, synthetic construct
  REGION 1..7: note = n-mer motif
LRVTENP

SEQ ID NO: 4728 - DNA, 21 bp, synthetic construct
  misc_feature 1..21: note = n-mer motif encoding polynucleotide
  source 1..21: mol_type = other DNA
cttcgggtcaccgaaaacccc

SEQ ID NO: 4729 - protein, 7 aa, synthetic construct
  REGION 1..7: note = n-mer motif
VTEHTQF

SEQ ID NO: 4730 - DNA, 21 bp, synthetic construct
  misc_feature 1..21: note = n-mer motif encoding polynucleotide
  source 1..21: mol_type = other DNA
gtgactgagcatacgcagttt

SEQ ID NO: 4731 - protein, 7 aa, synthetic construct
  REGION 1..7: note = n-mer motif
SQAEGSV

SEQ ID NO: 4732 - DNA, 21 bp, synthetic construct
  misc_feature 1..21: note = n-mer motif encoding polynucleotide
  source 1..21: mol_type = other DNA
tcccaagcggaaggcagcgtg

SEQ ID NO: 4733 - protein, 7 aa, synthetic construct
  REGION 1..7: note = n-mer motif
VLLGINT

SEQ ID NO: 4734 - DNA, 21 bp, synthetic construct
  misc_feature 1..21: note = n-mer motif encoding polynucleotide
  source 1..21: mol_type = other DNA
gtcctgctcggaataaacacc

SEQ ID NO: 4735 - protein, 7 aa, synthetic construct
  REGION 1..7: note = n-mer motif
LDSGIPR

SEQ ID NO: 4736 - DNA, 21 bp, synthetic construct
  misc_feature 1..21: note = n-mer motif encoding polynucleotide
  source 1..21: mol_type = other DNA
ctcgactctggtatccccaga

SEQ ID NO: 4737 - protein, 7 aa, synthetic construct
  REGION 1..7: note = n-mer motif
GLGLAAN

SEQ ID NO: 4738 - DNA, 21 bp, synthetic construct
  misc_feature 1..21: note = n-mer motif encoding polynucleotide
  source 1..21: mol_type = other DNA
ggtttgggtttggcggcgaat

SEQ ID NO: 4739 - protein, 7 aa, synthetic construct
  REGION 1..7: note = n-mer motif
VMSGTSH

SEQ ID NO: 4740 - DNA, 21 bp, synthetic construct
  misc_feature 1..21: note = n-mer motif encoding polynucleotide
  source 1..21: mol_type = other DNA
gttatgtcgggtactagtcat

SEQ ID NO: 4741 - protein, 7 aa, synthetic construct
  REGION 1..7: note = n-mer motif
DVAAGYR

SEQ ID NO: 4742 - DNA, 21 bp, synthetic construct
  misc_feature 1..21: note = n-mer motif encoding polynucleotide
  source 1..21: mol_type = other DNA
gacgtagcggcaggataccga

SEQ ID NO: 4743 - protein, 7 aa, synthetic construct
  REGION 1..7: note = n-mer motif
SIGDLGK

SEQ ID NO: 4744 - DNA, 21 bp, synthetic construct
  misc_feature 1..21: note = n-mer motif encoding polynucleotide
  source 1..21: mol_type = other DNA
agtatcggtgacctaggtaaa

SEQ ID NO: 4745 - protein, 7 aa, synthetic construct
  REGION 1..7: note = n-mer motif
NGSSIGV

SEQ ID NO: 4746 - DNA, 21 bp, synthetic construct
  misc_feature 1..21: note = n-mer motif encoding polynucleotide
  source 1..21: mol_type = other DNA
aacggctcatctatcggcgtg

SEQ ID NO: 4747 - protein, 7 aa, synthetic construct
  REGION 1..7: note = n-mer motif
LERGHMY

SEQ ID NO: 4748 - DNA, 21 bp, synthetic construct
  misc_feature 1..21: note = n-mer motif encoding polynucleotide
  source 1..21: mol_type = other DNA
ctcgaaagaggccacatgtac

SEQ ID NO: 4749 - protein, 7 aa, synthetic construct
  REGION 1..7: note = n-mer motif
ITENASR

SEQ ID NO: 4750 - DNA, 21 bp, synthetic construct
  misc_feature 1..21: note = n-mer motif encoding polynucleotide
  source 1..21: mol_type = other DNA
attactgagaatgcgtcgcgg

SEQ ID NO: 4751 - protein, 7 aa, synthetic construct
  REGION 1..7: note = n-mer motif
VHDSTPL

SEQ ID NO: 4752 - DNA, 21 bp, synthetic construct
  misc_feature 1..21: note = n-mer motif encoding polynucleotide
  source 1..21: mol_type = other DNA
gtgcatgattcgactccgttg

SEQ ID NO: 4753 - protein, 7 aa, synthetic construct
  REGION 1..7: note = n-mer motif
TLALSER

SEQ ID NO: 4754 - DNA, 21 bp, synthetic construct
  misc_feature 1..21: note = n-mer motif encoding polynucleotide
  source 1..21: mol_type = other DNA
accttagccttatcagaacga

SEQ ID NO: 4755 - protein, 7 aa, synthetic construct
  REGION 1..7: note = n-mer motif
TVDSPMR

SEQ ID NO: 4756 - DNA, 21 bp, synthetic construct
  misc_feature 1..21: note = n-mer motif encoding polynucleotide
  source 1..21: mol_type = other DNA
accgtcgacagccctatgcga

SEQ ID NO: 4757 - protein, 7 aa, synthetic construct
  REGION 1..7: note = n-mer motif
STLHTSI

SEQ ID NO: 4758 - DNA, 21 bp, synthetic construct
  misc_feature 1..21: note = n-mer motif encoding polynucleotide
  source 1..21: mol_type = other DNA
agtactcttcatacttcgatt

SEQ ID NO: 4759 - protein, 7 aa, synthetic construct
  REGION 1..7: note = n-mer motif
VGSLTAS

SEQ ID NO: 4760 - DNA, 21 bp, synthetic construct
  misc_feature 1..21: note = n-mer motif encoding polynucleotide
  source 1..21: mol_type = other DNA
gtggggtcgcttacggctagt

SEQ ID NO: 4761 - protein, 7 aa, synthetic construct
  REGION 1..7: note = n-mer motif
MAGGTNP

SEQ ID NO: 4762 - DNA, 21 bp, synthetic construct
  misc_feature 1..21: note = n-mer motif encoding polynucleotide
  source 1..21: mol_type = other DNA
atggcaggtggcacaaaccct

SEQ ID NO: 4763 - protein, 7 aa, synthetic construct
  REGION 1..7: note = n-mer motif
SLSDGSL

SEQ ID NO: 4764 - DNA, 21 bp, synthetic construct
  misc_feature 1..21: note = n-mer motif encoding polynucleotide
  source 1..21: mol_type = other DNA
tctctgtctgatggttctctt

SEQ ID NO: 4765 - protein, 7 aa, synthetic construct
  REGION 1..7: note = n-mer motif
IHFSGDN

SEQ ID NO: 4766 - DNA, 21 bp, synthetic construct
  misc_feature 1..21: note = n-mer motif encoding polynucleotide
  source 1..21: mol_type = other DNA
atccacttcagcggcgacaac

SEQ ID NO: 4767 - protein, 7 aa, synthetic construct
  REGION 1..7: note = n-mer motif
TGRVEAA

SEQ ID NO: 4768 - DNA, 21 bp, synthetic construct
  misc_feature 1..21: note = n-mer motif encoding polynucleotide
  source 1..21: mol_type = other DNA
acgggtagggttgaggcggcg

SEQ ID NO: 4769 - protein, 7 aa, synthetic construct
  REGION 1..7: note = n-mer motif
TTAAIVT

SEQ ID NO: 4770 - DNA, 21 bp, synthetic construct
  misc_feature 1..21: note = n-mer motif encoding polynucleotide
  source 1..21: mol_type = other DNA
acgacggcggctattgttacg

SEQ ID NO: 4771 - protein, 7 aa, synthetic construct
  REGION 1..7: note = n-mer motif
SIQSEVT

SEQ ID NO: 4772 - DNA, 21 bp, synthetic construct
  misc_feature 1..21: note = n-mer motif encoding polynucleotide
  source 1..21: mol_type = other DNA
agcatccaatccgaagttacc

SEQ ID NO: 4773 - protein, 7 aa, synthetic construct
  REGION 1..7: note = n-mer motif
DSSGGGT

SEQ ID NO: 4774 - DNA, 21 bp, synthetic construct
  misc_feature 1..21: note = n-mer motif encoding polynucleotide
  source 1..21: mol_type = other DNA
gacagctcaggcgggggcaca

SEQ ID NO: 4775 - protein, 7 aa, synthetic construct
  REGION 1..7: note = n-mer motif
TMAISDR

SEQ ID NO: 4776 - DNA, 21 bp, synthetic construct
  misc_feature 1..21: note = n-mer motif encoding polynucleotide
  source 1..21: mol_type = other DNA
actatggcgatttctgatcgg

SEQ ID NO: 4777 - protein, 7 aa, synthetic construct
  REGION 1..7: note = n-mer motif
RVENGGT

SEQ ID NO: 4778 - DNA, 21 bp, synthetic construct
  misc_feature 1..21: note = n-mer motif encoding polynucleotide
  source 1..21: mol_type = other DNA
cgagtggaaaacggcgggacc

SEQ ID NO: 4779 - protein, 7 aa, synthetic construct
  REGION 1..7: note = n-mer motif
REALALT

SEQ ID NO: 4780 - DNA, 21 bp, synthetic construct
  misc_feature 1..21: note = n-mer motif encoding polynucleotide
  source 1..21: mol_type = other DNA
agggaggcgctggctctgacg

SEQ ID NO: 4781 - protein, 7 aa, synthetic construct
  REGION 1..7: note = n-mer motif
IVTPTNT

SEQ ID NO: 4782 - DNA, 21 bp, synthetic construct
  misc_feature 1..21: note = n-mer motif encoding polynucleotide
  source 1..21: mol_type = other DNA
attgttactcctacgaatacg

SEQ ID NO: 4783 - protein, 7 aa, synthetic construct
  REGION 1..7: note = n-mer motif
LTSDNLA

SEQ ID NO: 4784 - DNA, 21 bp, synthetic construct
  misc_feature 1..21: note = n-mer motif encoding polynucleotide
  source 1..21: mol_type = other DNA
cttacctcagacaacctagcc

SEQ ID NO: 4785 - protein, 7 aa, synthetic construct
  REGION 1..7: note = n-mer motif
DAPRDGA

SEQ ID NO: 4786 - DNA, 21 bp, synthetic construct
  misc_feature 1..21: note = n-mer motif encoding polynucleotide
  source 1..21: mol_type = other DNA
gacgcaccccgcgacggggct

SEQ ID NO: 4787 - protein, 7 aa, synthetic construct
  REGION 1..7: note = n-mer motif
AVLSQNI

SEQ ID NO: 4788 - DNA, 21 bp, synthetic construct
  misc_feature 1..21: note = n-mer motif encoding polynucleotide
  source 1..21: mol_type = other DNA
gctgtgttgtctcagaatatt

SEQ ID NO: 4789 - protein, 7 aa, synthetic construct
  REGION 1..7: note = n-mer motif
VLLGSNR

SEQ ID NO: 4790 - DNA, 21 bp, synthetic construct
  misc_feature 1..21: note = n-mer motif encoding polynucleotide
  source 1..21: mol_type = other DNA
gtgcttttgggtagtaatagg

SEQ ID NO: 4791 - protein, 7 aa, synthetic construct
  REGION 1..7: note = n-mer motif
SMAVTAK

SEQ ID NO: 4792 - DNA, 21 bp, synthetic construct
  misc_feature 1..21: note = n-mer motif encoding polynucleotide
  source 1..21: mol_type = other DNA
agtatggcggtgacggcgaag

SEQ ID NO: 4793 - protein, 7 aa, synthetic construct
  REGION 1..7: note = n-mer motif
WSSELHA

SEQ ID NO: 4794 - DNA, 21 bp, synthetic construct
  misc_feature 1..21: note = n-mer motif encoding polynucleotide
  source 1..21: mol_type = other DNA
tggtctagtgagttgcatgct

SEQ ID NO: 4795 - protein, 7 aa, synthetic construct
  REGION 1..7: note = n-mer motif
ENTVSPV

SEQ ID NO: 4796 - DNA, 21 bp, synthetic construct
  misc_feature 1..21: note = n-mer motif encoding polynucleotide
  source 1..21: mol_type = other DNA
gaaaacacagtgagccccgtc

SEQ ID NO: 4797 - protein, 7 aa, synthetic construct
  REGION 1..7: note = n-mer motif
LNMGPLH

SEQ ID NO: 4798 - DNA, 21 bp, synthetic construct
  misc_feature 1..21: note = n-mer motif encoding polynucleotide
  source 1..21: mol_type = other DNA
ctgaatatgggtcctttgcat

SEQ ID NO: 4799 - protein, 7 aa, synthetic construct
  REGION 1..7: note = n-mer motif
GRGTNDH

SEQ ID NO: 4800 - DNA, 21 bp, synthetic construct
  misc_feature 1..21: note = n-mer motif encoding polynucleotide
  source 1..21: mol_type = other DNA
ggtcggggtacgaatgatcat

SEQ ID NO: 4801 - protein, 7 aa, synthetic construct
  REGION 1..7: note = n-mer motif
STEYAML

SEQ ID NO: 4802 - DNA, 21 bp, synthetic construct
  misc_feature 1..21: note = n-mer motif encoding polynucleotide
  source 1..21: mol_type = other DNA
tctactgagtatgcgatgttg

SEQ ID NO: 4803 - protein, 7 aa, synthetic construct
  REGION 1..7: note = n-mer motif
MGSNGQV

SEQ ID NO: 4804 - DNA, 21 bp, synthetic construct
  misc_feature 1..21: note = n-mer motif encoding polynucleotide
  source 1..21: mol_type = other DNA
atggggtctaatgggcaggtt

SEQ ID NO: 4805 - protein, 7 aa, synthetic construct
  REGION 1..7: note = n-mer motif
LAGSVVV

SEQ ID NO: 4806 - DNA, 21 bp, synthetic construct
  misc_feature 1..21: note = n-mer motif encoding polynucleotide
  source 1..21: mol_type = other DNA
ctggcgggttcggttgttgtg

SEQ ID NO: 4807 - protein, 7 aa, synthetic construct
  REGION 1..7: note = n-mer motif
YSMTVTT

SEQ ID NO: 4808 - DNA, 21 bp, synthetic construct
  misc_feature 1..21: note = n-mer motif encoding polynucleotide
  source 1..21: mol_type = other DNA
tatagtatgacggttacgact

SEQ ID NO: 4809 - protein, 7 aa, synthetic construct
  REGION 1..7: note = n-mer motif
VLVGTSL

SEQ ID NO: 4810 - DNA, 21 bp, synthetic construct
  misc_feature 1..21: note = n-mer motif encoding polynucleotide
  source 1..21: mol_type = other DNA
gttcttgttgggacgagtttg

SEQ ID NO: 4811 - protein, 7 aa, synthetic construct
  REGION 1..7: note = n-mer motif
MVTPTNR

SEQ ID NO: 4812 - DNA, 21 bp, synthetic construct
  misc_feature 1..21: note = n-mer motif encoding polynucleotide
  source 1..21: mol_type = other DNA
atggtgacacccacaaaccgc

SEQ ID NO: 4813 - protein, 7 aa, synthetic construct
  REGION 1..7: note = n-mer motif
VTTLTPV

SEQ ID NO: 4814 - DNA, 21 bp, synthetic construct
  misc_feature 1..21: note = n-mer motif encoding polynucleotide
  source 1..21: mol_type = other DNA
gtgactacgcttactcctgtg

SEQ ID NO: 4815 - protein, 7 aa, synthetic construct
  REGION 1..7: note = n-mer motif
QTGEAAV

SEQ ID NO: 4816 - DNA, 21 bp, synthetic construct
  misc_feature 1..21: note = n-mer motif encoding polynucleotide
  source 1..21: mol_type = other DNA
cagacgggggaggcggcggtt

SEQ ID NO: 4817 - protein, 7 aa, synthetic construct
  REGION 1..7: note = n-mer motif
NDRITST

SEQ ID NO: 4818 - DNA, 21 bp, synthetic construct
  misc_feature 1..21: note = n-mer motif encoding polynucleotide
  source 1..21: mol_type = other DNA
aacgaccgaataacctcaact

SEQ ID NO: 4819 - protein, 7 aa, synthetic construct
  REGION 1..7: note = n-mer motif
SDGKTHT

SEQ ID NO: 4820 - DNA, 21 bp, synthetic construct
  misc_feature 1..21: note = n-mer motif encoding polynucleotide
  source 1..21: mol_type = other DNA
tcagacggcaaaacccacacc

SEQ ID NO: 4821 - protein, 7 aa, synthetic construct
  REGION 1..7: note = n-mer motif
TSLLPQT

SEQ ID NO: 4822 - DNA, 21 bp, synthetic construct
  misc_feature 1..21: note = n-mer motif encoding polynucleotide
  source 1..21: mol_type = other DNA
acgtctctgcttcctcagact

SEQ ID NO: 4823 - protein, 7 aa, synthetic construct
  REGION 1..7: note = n-mer motif
PSLEHLA

SEQ ID NO: 4824 - DNA, 21 bp, synthetic construct
  misc_feature 1..21: note = n-mer motif encoding polynucleotide
  source 1..21: mol_type = other DNA
cctagtcttgagcatttggct

SEQ ID NO: 4825 - protein, 7 aa, synthetic construct
  REGION 1..7: note = n-mer motif
DHGSFAK

SEQ ID NO: 4826 - DNA, 21 bp, synthetic construct
  misc_feature 1..21: note = n-mer motif encoding polynucleotide
  source 1..21: mol_type = other DNA
gatcatggtagttttgcgaag

SEQ ID NO: 4827 - protein, 7 aa, synthetic construct
  REGION 1..7: note = n-mer motif
PTNGYPL

SEQ ID NO: 4828 - DNA, 21 bp, synthetic construct
  misc_feature 1..21: note = n-mer motif encoding polynucleotide
  source 1..21: mol_type = other DNA
cccacaaacgggtacccgctc

SEQ ID NO: 4829 - protein, 7 aa, synthetic construct
  REGION 1..7: note = n-mer motif
TLTDVVH

SEQ ID NO: 4830 - DNA, 21 bp, synthetic construct
  misc_feature 1..21: note = n-mer motif encoding polynucleotide
  source 1..21: mol_type = other DNA
actcttactgatgtggtgcat

SEQ ID NO: 4831 - protein, 7 aa, synthetic construct
  REGION 1..7: note = n-mer motif
LADGSVR

SEQ ID NO: 4832 - DNA, 21 bp, synthetic construct
  misc_feature 1..21: note = n-mer motif encoding polynucleotide
  source 1..21: mol_type = other DNA
ttagcagacggctccgtccgc

SEQ ID NO: 4833 - protein, 7 aa, synthetic construct
  REGION 1..7: note = n-mer motif
GGVSSTN

SEQ ID NO: 4834 - DNA, 21 bp, synthetic construct
  misc_feature 1..21: note = n-mer motif encoding polynucleotide
  source 1..21: mol_type = other DNA
ggtggtgtttcttcgactaat

SEQ ID NO: 4835 - protein, 7 aa, synthetic construct
  REGION 1..7: note = n-mer motif
SHGTDSK

SEQ ID NO: 4836 - DNA, 21 bp, synthetic construct
  misc_feature 1..21: note = n-mer motif encoding polynucleotide
  source 1..21: mol_type = other DNA
agtcacggcacggactctaaa

SEQ ID NO: 4837 - protein, 7 aa, synthetic construct
  REGION 1..7: note = n-mer motif
ALATDMS

SEQ ID NO: 4838 - DNA, 21 bp, synthetic construct
  misc_feature 1..21: note = n-mer motif encoding polynucleotide
  source 1..21: mol_type = other DNA
gcgctggctactgatatgtcg

SEQ ID NO: 4839 - protein, 7 aa, synthetic construct
  REGION 1..7: note = n-mer motif
QVRDTMT

SEQ ID NO: 4840 - DNA, 21 bp, synthetic construct
  misc_feature 1..21: note = n-mer motif encoding polynucleotide
  source 1..21: mol_type = other DNA
caagtcagagacacgatgacc

SEQ ID NO: 4841 - protein, 7 aa, synthetic construct
  REGION 1..7: note = n-mer motif
NGYTEGR

SEQ ID NO: 4842 - DNA, 21 bp, synthetic construct
  misc_feature 1..21: note = n-mer motif encoding polynucleotide
  source 1..21: mol_type = other DNA
aatgggtatacggaggggcgt

SEQ ID NO: 4843 - protein, 7 aa, synthetic construct
  REGION 1..7: note = n-mer motif
DSRVSGD

SEQ ID NO: 4844 - DNA, 21 bp, synthetic construct
  misc_feature 1..21: note = n-mer motif encoding polynucleotide
  source 1..21: mol_type = other DNA
gatagtcgtgtgtcgggggat

SEQ ID NO: 4845 - protein, 7 aa, synthetic construct
  REGION 1..7: note = n-mer motif
VLSGEEL

SEQ ID NO: 4846 - DNA, 21 bp, synthetic construct
  misc_feature 1..21: note = n-mer motif encoding polynucleotide
  source 1..21: mol_type = other DNA
gttcttagtggggaggagttg

SEQ ID NO: 4847 - protein, 7 aa, synthetic construct
  REGION 1..7: note = n-mer motif
HNGQVGV

SEQ ID NO: 4848 - DNA, 21 bp, synthetic construct
  misc_feature 1..21: note = n-mer motif encoding polynucleotide
  source 1..21: mol_type = other DNA
cataatgggcaggttggtgtg

SEQ ID NO: 4849 - protein, 7 aa, synthetic construct
  REGION 1..7: note = n-mer motif
HNSHVLT

SEQ ID NO: 4850 - DNA, 21 bp, synthetic construct
  misc_feature 1..21: note = n-mer motif encoding polynucleotide
  source 1..21: mol_type = other DNA
cacaactcccacgtattaacc

SEQ ID NO: 4851 - protein, 7 aa, synthetic construct
  REGION 1..7: note = n-mer motif
RPEIEVR

SEQ ID NO: 4852 - DNA, 21 bp, synthetic construct
  misc_feature 1..21: note = n-mer motif encoding polynucleotide
  source 1..21: mol_type = other DNA
cggccggagattgaggttagg

SEQ ID NO: 4853 - protein, 7 aa, synthetic construct
  REGION 1..7: note = n-mer motif
KGSDSPM

SEQ ID NO: 4854 - DNA, 21 bp, synthetic construct
  misc_feature 1..21: note = n-mer motif encoding polynucleotide
  source 1..21: mol_type = other DNA
aaaggatcggactcaccgatg

SEQ ID NO: 4855 - protein, 7 aa, synthetic construct
  REGION 1..7: note = n-mer motif
DQLNDGR

SEQ ID NO: 4856 - DNA, 21 bp, synthetic construct
  misc_feature 1..21: note = n-mer motif encoding polynucleotide
  source 1..21: mol_type = other DNA
gatcagctgaatgatgggcgg

SEQ ID NO: 4857 - protein, 7 aa, synthetic construct
  REGION 1..7: note = n-mer motif
SLLHDGA

SEQ ID NO: 4858 - DNA, 21 bp, synthetic construct
  misc_feature 1..21: note = n-mer motif encoding polynucleotide
  source 1..21: mol_type = other DNA
agtttgttgcatgatggggcg

SEQ ID NO: 4859 - protein, 7 aa, synthetic construct
  REGION 1..7: note = n-mer motif
RDTQYDH

SEQ ID NO: 4860 - DNA, 21 bp, synthetic construct
  misc_feature 1..21: note = n-mer motif encoding polynucleotide
  source 1..21: mol_type = other DNA
cgtgatacgcagtatgatcat

SEQ ID NO: 4861 - protein, 7 aa, synthetic construct
  REGION 1..7: note = n-mer motif
PREHNQA

SEQ ID NO: 4862 - DNA, 21 bp, synthetic construct
  misc_feature 1..21: note = n-mer motif encoding polynucleotide
  source 1..21: mol_type = other DNA
ccgcgtgagcataatcaggct

SEQ ID NO: 4863 - protein, 7 aa, synthetic construct
  REGION 1..7: note = n-mer motif
SRLENIS

SEQ ID NO: 4864 - DNA, 21 bp, synthetic construct
  misc_feature 1..21: note = n-mer motif encoding polynucleotide
  source 1..21: mol_type = other DNA
tcgcgtcttgaaaacatctcc

SEQ ID NO: 4865 - protein, 7 aa, synthetic construct
  REGION 1..7: note = n-mer motif
FDQTHKT

SEQ ID NO: 4866 - DNA, 21 bp, synthetic construct
  misc_feature 1..21: note = n-mer motif encoding polynucleotide
  source 1..21: mol_type = other DNA
tttgatcagacgcataagact

SEQ ID NO: 4867 - protein, 7 aa, synthetic construct
  REGION 1..7: note = n-mer motif
MTGISIV

SEQ ID NO: 4868 - DNA, 21 bp, synthetic construct
  misc_feature 1..21: note = n-mer motif encoding polynucleotide
  source 1..21: mol_type = other DNA
atgacaggcatctctatcgta

SEQ ID NO: 4869 - protein, 7 aa, synthetic construct
  REGION 1..7: note = n-mer motif
ASSHVTV

SEQ ID NO: 4870 - DNA, 21 bp, synthetic construct
  misc_feature 1..21: note = n-mer motif encoding polynucleotide
  source 1..21: mol_type = other DNA
gcttcgagtcatgttactgtg

SEQ ID NO: 4871 - protein, 7 aa, synthetic construct
  REGION 1..7: note = n-mer motif
SHGSDLK

SEQ ID NO: 4872 - DNA, 21 bp, synthetic construct
  misc_feature 1..21: note = n-mer motif encoding polynucleotide
  source 1..21: mol_type = other DNA
agccacgggagcgacctaaaa

SEQ ID NO: 4873 - protein, 7 aa, synthetic construct
  REGION 1..7: note = n-mer motif
NIGADPK

SEQ ID NO: 4874 - DNA, 21 bp, synthetic construct
  misc_feature 1..21: note = n-mer motif encoding polynucleotide
  source 1..21: mol_type = other DNA
aacatcggggccgaccccaaa

SEQ ID NO: 4875 - protein, 7 aa, synthetic construct
  REGION 1..7: note = n-mer motif
TLGSLSQ

SEQ ID NO: 4876 - DNA, 21 bp, synthetic construct
  misc_feature 1..21: note = n-mer motif encoding polynucleotide
  source 1..21: mol_type = other DNA
acactagggtccctgtcacaa

SEQ ID NO: 4877 - protein, 7 aa, synthetic construct
  REGION 1..7: note = n-mer motif
PTQGTIR

SEQ ID NO: 4878 - DNA, 21 bp, synthetic construct
  misc_feature 1..21: note = n-mer motif encoding polynucleotide
  source 1..21: mol_type = other DNA
cctactcaggggacgattcgg

SEQ ID NO: 4879 - protein, 7 aa, synthetic construct
  REGION 1..7: note = n-mer motif
FTGGTGT

SEQ ID NO: 4880 - DNA, 21 bp, synthetic construct
  misc_feature 1..21: note = n-mer motif encoding polynucleotide
  source 1..21: mol_type = other DNA
tttactggtggtacgggtact

SEQ ID NO: 4881 - protein, 7 aa, synthetic construct
  REGION 1..7: note = n-mer motif
IPSTGAQ

SEQ ID NO: 4882 - DNA, 21 bp, synthetic construct
  misc_feature 1..21: note = n-mer motif encoding polynucleotide
  source 1..21: mol_type = other DNA
attccgagtacgggggcgcag

SEQ ID NO: 4883 - protein, 7 aa, synthetic construct
  REGION 1..7: note = n-mer motif
STLHTTT

SEQ ID NO: 4884 - DNA, 21 bp, synthetic construct
  misc_feature 1..21: note = n-mer motif encoding polynucleotide
  source 1..21: mol_type = other DNA
agtactcttcatactacgact

SEQ ID NO: 4885 - protein, 7 aa, synthetic construct
  REGION 1..7: note = n-mer motif
GGTNSAH

SEQ ID NO: 4886 - DNA, 21 bp, synthetic construct
  misc_feature 1..21: note = n-mer motif encoding polynucleotide
  source 1..21: mol_type = other DNA
ggtggaacaaactcagcgcac

SEQ ID NO: 4887 - protein, 7 aa, synthetic construct
  REGION 1..7: note = n-mer motif
NVGLVSP

SEQ ID NO: 4888 - DNA, 21 bp, synthetic construct
  misc_feature 1..21: note = n-mer motif encoding polynucleotide
  source 1..21: mol_type = other DNA
aacgtagggctcgtatcacca

SEQ ID NO: 4889 - protein, 7 aa, synthetic construct
  REGION 1..7: note = n-mer motif
VYESTVR

SEQ ID NO: 4890 - DNA, 21 bp, synthetic construct
  misc_feature 1..21: note = n-mer motif encoding polynucleotide
  source 1..21: mol_type = other DNA
gtttatgagagtacggtgagg

SEQ ID NO: 4891 - protein, 7 aa, synthetic construct
  REGION 1..7: note = n-mer motif
MGASDTH

SEQ ID NO: 4892 - DNA, 21 bp, synthetic construct
  misc_feature 1..21: note = n-mer motif encoding polynucleotide
  source 1..21: mol_type = other DNA
atgggggctagtgatacgcat

SEQ ID NO: 4893 - protein, 7 aa, synthetic construct
  REGION 1..7: note = n-mer motif
VIATGNP

SEQ ID NO: 4894 - DNA, 21 bp, synthetic construct
  misc_feature 1..21: note = n-mer motif encoding polynucleotide
  source 1..21: mol_type = other DNA
gttattgctacggggaatcct

SEQ ID NO: 4895 - protein, 7 aa, synthetic construct
  REGION 1..7: note = n-mer motif
PEQQKVW

SEQ ID NO: 4896 - DNA, 21 bp, synthetic construct
  misc_feature 1..21: note = n-mer motif encoding polynucleotide
  source 1..21: mol_type = other DNA
cctgagcagcagaaggtttgg

SEQ ID NO: 4897 - protein, 7 aa, synthetic construct
  REGION 1..7: note = n-mer motif
SDGQFGR

SEQ ID NO: 4898 - DNA, 21 bp, synthetic construct
  misc_feature 1..21: note = n-mer motif encoding polynucleotide
  source 1..21: mol_type = other DNA
tctgacggtcaattcggacga

SEQ ID NO: 4899 - protein, 7 aa, synthetic construct
  REGION 1..7: note = n-mer motif
IMTSVTM

SEQ ID NO: 4900 - DNA, 21 bp, synthetic construct
  misc_feature 1..21: note = n-mer motif encoding polynucleotide
  source 1..21: mol_type = other DNA
atcatgacaagtgttacaatg

SEQ ID NO: 4901 - protein, 7 aa, synthetic construct
  REGION 1..7: note = n-mer motif
AQDHGTL

SEQ ID NO: 4902 - DNA, 21 bp, synthetic construct
  misc_feature 1..21: note = n-mer motif encoding polynucleotide
  source 1..21: mol_type = other DNA
gcgcaggatcatgggacgttg

SEQ ID NO: 4903 - protein, 7 aa, synthetic construct
  REGION 1..7: note = n-mer motif
GGLVVVG

SEQ ID NO: 4904 - DNA, 21 bp, synthetic construct
  misc_feature 1..21: note = n-mer motif encoding polynucleotide
  source 1..21: mol_type = other DNA
ggcggactagtagtcgtgggg

SEQ ID NO: 4905 - protein, 7 aa, synthetic construct
  REGION 1..7: note = n-mer motif
TSVESNL

SEQ ID NO: 4906 - DNA, 21 bp, synthetic construct
  misc_feature 1..21: note = n-mer motif encoding polynucleotide
  source 1..21: mol_type = other DNA
acgtcggtggagtcgaatctt

SEQ ID NO: 4907 - protein, 7 aa, synthetic construct
  REGION 1..7: note = n-mer motif
SVTDIKH

SEQ ID NO: 4908 - DNA, 21 bp, synthetic construct
  misc_feature 1..21: note = n-mer motif encoding polynucleotide
  source 1..21: mol_type = other DNA
tcggtgacggacataaaacac

SEQ ID NO: 4909 - protein, 7 aa, synthetic construct
  REGION 1..7: note = n-mer motif
LSMTDGL

SEQ ID NO: 4910 - DNA, 21 bp, synthetic construct
  misc_feature 1..21: note = n-mer motif encoding polynucleotide
  source 1..21: mol_type = other DNA
ctgagtatgactgatgggctt

SEQ ID NO: 4911 - protein, 7 aa, synthetic construct
  REGION 1..7: note = n-mer motif
LNMKADG

SEQ ID NO: 4912 - DNA, 21 bp, synthetic construct
  misc_feature 1..21: note = n-mer motif encoding polynucleotide
  source 1..21: mol_type = other DNA
ttaaacatgaaagcagacgga

SEQ ID NO: 4913 - protein, 7 aa, synthetic construct
  REGION 1..7: note = n-mer motif
LNSGVSR

SEQ ID NO: 4914 - DNA, 21 bp, synthetic construct
  misc_feature 1..21: note = n-mer motif encoding polynucleotide
  source 1..21: mol_type = other DNA
ctcaacagtggtgtcagccgc

SEQ ID NO: 4915 - protein, 7 aa, synthetic construct
  REGION 1..7: note = n-mer motif
STIPTLL

SEQ ID NO: 4916 - DNA, 21 bp, synthetic construct
  misc_feature 1..21: note = n-mer motif encoding polynucleotide
  source 1..21: mol_type = other DNA
agtactattcctactctgttg

SEQ ID NO: 4917 - protein, 7 aa, synthetic construct
  REGION 1..7: note = n-mer motif
TFGIDAS

SEQ ID NO: 4918 - DNA, 21 bp, synthetic construct
  misc_feature 1..21: note = n-mer motif encoding polynucleotide
  source 1..21: mol_type = other DNA
acattcggaatcgacgcgtcc

SEQ ID NO: 4919 - protein, 7 aa, synthetic construct
  REGION 1..7: note = n-mer motif
AVGVILN

SEQ ID NO: 4920 - DNA, 21 bp, synthetic construct
  misc_feature 1..21: note = n-mer motif encoding polynucleotide
  source 1..21: mol_type = other DNA
gcggtgggtgttattctgaat

SEQ ID NO: 4921 - protein, 7 aa, synthetic construct
  REGION 1..7: note = n-mer motif
GSREDVR

SEQ ID NO: 4922 - DNA, 21 bp, synthetic construct
  misc_feature 1..21: note = n-mer motif encoding polynucleotide
  source 1..21: mol_type = other DNA
gggagtagggaggatgtgcgt

SEQ ID NO: 4923 - protein, 7 aa, synthetic construct
  REGION 1..7: note = n-mer motif
HLHNTLN

SEQ ID NO: 4924 - DNA, 21 bp, synthetic construct
  misc_feature 1..21: note = n-mer motif encoding polynucleotide
  source 1..21: mol_type = other DNA
catcttcataatactcttaat

SEQ ID NO: 4925 - protein, 7 aa, synthetic construct
  REGION 1..7: note = n-mer motif
VSVAVGL

SEQ ID NO: 4926 - DNA, 21 bp, synthetic construct
  misc_feature 1..21: note = n-mer motif encoding polynucleotide
  source 1..21: mol_type = other DNA
gtttcggtggctgttgggttg

SEQ ID NO: 4927 - protein, 7 aa, synthetic construct
  REGION 1..7: note = n-mer motif
LGVSRDL

SEQ ID NO: 4928 - DNA, 21 bp, synthetic construct
  misc_feature 1..21: note = n-mer motif encoding polynucleotide
  source 1..21: mol_type = other DNA
ctgggtgtgtctcgggatctg

SEQ ID NO: 4929 - protein, 7 aa, synthetic construct
  REGION 1..7: note = n-mer motif
KGSDNTM

SEQ ID NO: 4930 - DNA, 21 bp, synthetic construct
  misc_feature 1..21: note = n-mer motif encoding polynucleotide
  source 1..21: mol_type = other DNA
aagggttctgataatactatg

SEQ ID NO: 4931 - protein, 7 aa, synthetic construct
  REGION 1..7: note = n-mer motif
ASIPTLN

SEQ ID NO: 4932 - DNA, 21 bp, synthetic construct
  misc_feature 1..21: note = n-mer motif encoding polynucleotide
  source 1..21: mol_type = other DNA
gcatccataccaacgctaaac

SEQ ID NO: 4933 - protein, 7 aa, synthetic construct
  REGION 1..7: note = n-mer motif
YHASDSK

SEQ ID NO: 4934 - DNA, 21 bp, synthetic construct
  misc_feature 1..21: note = n-mer motif encoding polynucleotide
  source 1..21: mol_type = other DNA
tatcatgcttctgattcgaag

SEQ ID NO: 4935 - protein, 7 aa, synthetic construct
  REGION 1..7: note = n-mer motif
QYSELHH

SEQ ID NO: 4936 - DNA, 21 bp, synthetic construct
  misc_feature 1..21: note = n-mer motif encoding polynucleotide
  source 1..21: mol_type = other DNA
caatactccgaattgcaccac

SEQ ID NO: 4937 - protein, 7 aa, synthetic construct
  REGION 1..7: note = n-mer motif
DLTTPVR

SEQ ID NO: 4938 - DNA, 21 bp, synthetic construct
  misc_feature 1..21: note = n-mer motif encoding polynucleotide
  source 1..21: mol_type = other DNA
gatttgactactccggtgcgt

SEQ ID NO: 4939 - protein, 7 aa, synthetic construct
  REGION 1..7: note = n-mer motif
IGTEISS

SEQ ID NO: 4940 - DNA, 21 bp, synthetic construct
  misc_feature 1..21: note = n-mer motif encoding polynucleotide
  source 1..21: mol_type = other DNA
attggtacggagatttcgtcg

SEQ ID NO: 4941 - protein, 7 aa, synthetic construct
  REGION 1..7: note = n-mer motif
STDMRSP

SEQ ID NO: 4942 - DNA, 21 bp, synthetic construct
  misc_feature 1..21: note = n-mer motif encoding polynucleotide
  source 1..21: mol_type = other DNA
agtacggatatgaggtcgccg

SEQ ID NO: 4943 - protein, 7 aa, synthetic construct
  REGION 1..7: note = n-mer motif
TKITNED

SEQ ID NO: 4944 - DNA, 21 bp, synthetic construct
  misc_feature 1..21: note = n-mer motif encoding polynucleotide
  source 1..21: mol_type = other DNA
acaaaaatcactaacgaagac

SEQ ID NO: 4945 - protein, 7 aa, synthetic construct
  REGION 1..7: note = n-mer motif
STLQGEA

SEQ ID NO: 4946 - DNA, 21 bp, synthetic construct
  misc_feature 1..21: note = n-mer motif encoding polynucleotide
  source 1..21: mol_type = other DNA
agcaccctccaaggggaagca

SEQ ID NO: 4947 - protein, 7 aa, synthetic construct
  REGION 1..7: note = n-mer motif
PLLGNTI

SEQ ID NO: 4948 - DNA, 21 bp, synthetic construct
  misc_feature 1..21: note = n-mer motif encoding polynucleotide
  source 1..21: mol_type = other DNA
ccgcttttggggaatacgatt

SEQ ID NO: 4949 - protein, 7 aa, synthetic construct
  REGION 1..7: note = n-mer motif
NGLQVSI

SEQ ID NO: 4950 - DNA, 21 bp, synthetic construct
  misc_feature 1..21: note = n-mer motif encoding polynucleotide
  source 1..21: mol_type = other DNA
aatgggctgcaggttagtatt

SEQ ID NO: 4951 - protein, 7 aa, synthetic construct
  REGION 1..7: note = n-mer motif
AVTNPLM

SEQ ID NO: 4952 - DNA, 21 bp, synthetic construct
  misc_feature 1..21: note = n-mer motif encoding polynucleotide
  source 1..21: mol_type = other DNA
gcggttactaatcctttgatg

SEQ ID NO: 4953 - protein, 7 aa, synthetic construct
  REGION 1..7: note = n-mer motif
DVTVSMR

SEQ ID NO: 4954 - DNA, 21 bp, synthetic construct
  misc_feature 1..21: note = n-mer motif encoding polynucleotide
  source 1..21: mol_type = other DNA
gatgttactgtttctatgcgt

SEQ ID NO: 4955 - protein, 7 aa, synthetic construct
  REGION 1..7: note = n-mer motif
NQLAEQV

SEQ ID NO: 4956 - DNA, 21 bp, synthetic construct
  misc_feature 1..21: note = n-mer motif encoding polynucleotide
  source 1..21: mol_type = other DNA
aatcagttggcggagcaggtt

SEQ ID NO: 4957 - protein, 7 aa, synthetic construct
  REGION 1..7: note = n-mer motif
RPDASST

SEQ ID NO: 4958 - DNA, 21 bp, synthetic construct
  misc_feature 1..21: note = n-mer motif encoding polynucleotide
  source 1..21: mol_type = other DNA
aggcctgatgcttcttcgacg

SEQ ID NO: 4959 - protein, 7 aa, synthetic construct
  REGION 1..7: note = n-mer motif
DTSLRLM

SEQ ID NO: 4960 - DNA, 21 bp, synthetic construct
  misc_feature 1..21: note = n-mer motif encoding polynucleotide
  source 1..21: mol_type = other DNA
gacacctctctacgccttatg

SEQ ID NO: 4961 - protein, 7 aa, synthetic construct
  REGION 1..7: note = n-mer motif
TLPELKL

SEQ ID NO: 4962 - DNA, 21 bp, synthetic construct
  misc_feature 1..21: note = n-mer motif encoding polynucleotide
  source 1..21: mol_type = other DNA
acgttgccggagttgaagctt

SEQ ID NO: 4963 - protein, 7 aa, synthetic construct
  REGION 1..7: note = n-mer motif
QNGLQLL

SEQ ID NO: 4964 - DNA, 21 bp, synthetic construct
  misc_feature 1..21: note = n-mer motif encoding polynucleotide
  source 1..21: mol_type = other DNA
cagaatgggttgcagcttttg

SEQ ID NO: 4965 - protein, 7 aa, synthetic construct
  REGION 1..7: note = n-mer motif
ASREVLY

SEQ ID NO: 4966 - DNA, 21 bp, synthetic construct
  misc_feature 1..21: note = n-mer motif encoding polynucleotide
  source 1..21: mol_type = other DNA
gccagtcgcgaagtactctac

SEQ ID NO: 4967 - protein, 7 aa, synthetic construct
  REGION 1..7: note = n-mer motif
IASDIGR

SEQ ID NO: 4968 - DNA, 21 bp, synthetic construct
  misc_feature 1..21: note = n-mer motif encoding polynucleotide
  source 1..21: mol_type = other DNA
attgcttcggatattggtcgg

SEQ ID NO: 4969 - protein, 7 aa, synthetic construct
  REGION 1..7: note = n-mer motif
VADSYNL

SEQ ID NO: 4970 - DNA, 21 bp, synthetic construct
  misc_feature 1..21: note = n-mer motif encoding polynucleotide
  source 1..21: mol_type = other DNA
gtcgcagacagttacaaccta

SEQ ID NO: 4971 - protein, 7 aa, synthetic construct
  REGION 1..7: note = n-mer motif
STVGINV

SEQ ID NO: 4972 - DNA, 21 bp, synthetic construct
  misc_feature 1..21: note = n-mer motif encoding polynucleotide
  source 1..21: mol_type = other DNA
agtacggtcgggatcaacgtt

SEQ ID NO: 4973 - protein, 7 aa, synthetic construct
  REGION 1..7: note = n-mer motif
GVAGRIL

SEQ ID NO: 4974 - DNA, 21 bp, synthetic construct
  misc_feature 1..21: note = n-mer motif encoding polynucleotide
  source 1..21: mol_type = other DNA
ggggtggctgggcgtattctg

SEQ ID NO: 4975 - protein, 7 aa, synthetic construct
  REGION 1..7: note = n-mer motif
NEAVNVR

SEQ ID NO: 4976 - DNA, 21 bp, synthetic construct
  misc_feature 1..21: note = n-mer motif encoding polynucleotide
  source 1..21: mol_type = other DNA
aatgaggctgttaatgttcgg

SEQ ID NO: 4977 - protein, 7 aa, synthetic construct
  REGION 1..7: note = n-mer motif
TVGHDNK

SEQ ID NO: 4978 - DNA, 21 bp, synthetic construct
  misc_feature 1..21: note = n-mer motif encoding polynucleotide
  source 1..21: mol_type = other DNA
accgtaggacacgacaacaaa

SEQ ID NO: 4979 - protein, 7 aa, synthetic construct
  REGION 1..7: note = n-mer motif
TLQQLQL

SEQ ID NO: 4980 - DNA, 21 bp, synthetic construct
  misc_feature 1..21: note = n-mer motif encoding polynucleotide
  source 1..21: mol_type = other DNA
actctccaacaactgcaattg

SEQ ID NO: 4981 - protein, 7 aa, synthetic construct
  REGION 1..7: note = n-mer motif
ALSGLAN

SEQ ID NO: 4982 - DNA, 21 bp, synthetic construct
  misc_feature 1..21: note = n-mer motif encoding polynucleotide
  source 1..21: mol_type = other DNA
gcattgagcggcctggcgaac

SEQ ID NO: 4983 - protein, 7 aa, synthetic construct
  REGION 1..7: note = n-mer motif
ALGTQGS

SEQ ID NO: 4984 - DNA, 21 bp, synthetic construct
  misc_feature 1..21: note = n-mer motif encoding polynucleotide
  source 1..21: mol_type = other DNA
gctctgggtacgcagggttct

SEQ ID NO: 4985 - protein, 7 aa, synthetic construct
  REGION 1..7: note = n-mer motif
PNERLAV

SEQ ID NO: 4986 - DNA, 21 bp, synthetic construct
  misc_feature 1..21: note = n-mer motif encoding polynucleotide
  source 1..21: mol_type = other DNA
cctaacgaacgattggcagtc

SEQ ID NO: 4987 - protein, 7 aa, synthetic construct
  REGION 1..7: note = n-mer motif
GVAATNT

SEQ ID NO: 4988 - DNA, 21 bp, synthetic construct
  misc_feature 1..21: note = n-mer motif encoding polynucleotide
  source 1..21: mol_type = other DNA
ggagttgcagccacaaacacg

SEQ ID NO: 4989 - protein, 7 aa, synthetic construct
  REGION 1..7: note = n-mer motif
WDHNSLK

SEQ ID NO: 4990 - DNA, 21 bp, synthetic construct
  misc_feature 1..21: note = n-mer motif encoding polynucleotide
  source 1..21: mol_type = other DNA
tgggaccacaacagcttgaaa

SEQ ID NO: 4991 - protein, 7 aa, synthetic construct
  REGION 1..7: note = n-mer motif
LVGVVEP

SEQ ID NO: 4992 - DNA, 21 bp, synthetic construct
  misc_feature 1..21: note = n-mer motif encoding polynucleotide
  source 1..21: mol_type = other DNA
cttgttggtgtggttgagccg

SEQ ID NO: 4993 - protein, 7 aa, synthetic construct
  REGION 1..7: note = n-mer motif
TLTDRAS

SEQ ID NO: 4994 - DNA, 21 bp, synthetic construct
  misc_feature 1..21: note = n-mer motif encoding polynucleotide
  source 1..21: mol_type = other DNA
acgttgacggatagggcgtct

SEQ ID NO: 4995 - protein, 7 aa, synthetic construct
  REGION 1..7: note = n-mer motif
SGSNTGH

SEQ ID NO: 4996 - DNA, 21 bp, synthetic construct
  misc_feature 1..21: note = n-mer motif encoding polynucleotide
  source 1..21: mol_type = other DNA
tcggggtctaatacgggtcat

SEQ ID NO: 4997 - protein, 7 aa, synthetic construct
  REGION 1..7: note = n-mer motif
VLASHGT

SEQ ID NO: 4998 - DNA, 21 bp, synthetic construct
  misc_feature 1..21: note = n-mer motif encoding polynucleotide
  source 1..21: mol_type = other DNA
gttctggcttcgcatggtact

SEQ ID NO: 4999 - protein, 7 aa, synthetic construct
  REGION 1..7: note = n-mer motif
AVGNVLL

SEQ ID NO: 5000 - DNA, 21 bp, synthetic construct
  misc_feature 1..21: note = n-mer motif encoding polynucleotide
  source 1..21: mol_type = other DNA
gctgtggggaatgtgcttttg

SEQ ID NO: 5001 - protein, 7 aa, synthetic construct
  REGION 1..7: note = n-mer motif
NTVVNDP

SEQ ID NO: 5002 - DNA, 21 bp, synthetic construct
  misc_feature 1..21: note = n-mer motif encoding polynucleotide
  source 1..21: mol_type = other DNA
aacacagtcgtgaacgaccct

SEQ ID NO: 5003 - protein, 7 aa, synthetic construct
  REGION 1..7: note = n-mer motif
KLMDSRD

SEQ ID NO: 5004 - DNA, 21 bp, synthetic construct
  misc_feature 1..21: note = n-mer motif encoding polynucleotide
  source 1..21: mol_type = other DNA
aagctgatggattcgcgggat

SEQ ID NO: 5005 - protein, 7 aa, synthetic construct
  REGION 1..7: note = n-mer motif
RNQPEAM

SEQ ID NO: 5006 - DNA, 21 bp, synthetic construct
  misc_feature 1..21: note = n-mer motif encoding polynucleotide
  source 1..21: mol_type = other DNA
aggaaccaaccagaagccatg

SEQ ID NO: 5007 - protein, 7 aa, synthetic construct
  REGION 1..7: note = n-mer motif
VIAGLGV

SEQ ID NO: 5008 - DNA, 21 bp, synthetic construct
  misc_feature 1..21: note = n-mer motif encoding polynucleotide
  source 1..21: mol_type = other DNA
gtgatcgcgggactcggcgtc

SEQ ID NO: 5009 - protein, 7 aa, synthetic construct
  REGION 1..7: note = n-mer motif
RGQSDPL

SEQ ID NO: 5010 - DNA, 21 bp, synthetic construct
  misc_feature 1..21: note = n-mer motif encoding polynucleotide
  source 1..21: mol_type = other DNA
cgggggcagtctgatccgttg

SEQ ID NO: 5011 - protein, 7 aa, synthetic construct
  REGION 1..7: note = n-mer motif
GLNEHES

SEQ ID NO: 5012 - DNA, 21 bp, synthetic construct
  misc_feature 1..21: note = n-mer motif encoding polynucleotide
  source 1..21: mol_type = other DNA
gggcttaacgaacacgaatct

SEQ ID NO: 5013 - protein, 7 aa, synthetic construct
  REGION 1..7: note = n-mer motif
GVVNDER

SEQ ID NO: 5014 - DNA, 21 bp, synthetic construct
  misc_feature 1..21: note = n-mer motif encoding polynucleotide
  source 1..21: mol_type = other DNA
ggcgttgtcaacgacgaacgg

SEQ ID NO: 5015 - protein, 7 aa, synthetic construct
  REGION 1..7: note = n-mer motif
GTVGSMV

SEQ ID NO: 5016 - DNA, 21 bp, synthetic construct
  misc_feature 1..21: note = n-mer motif encoding polynucleotide
  source 1..21: mol_type = other DNA
ggtacggtgggttctatggtt

SEQ ID NO: 5017 - protein, 7 aa, synthetic construct
  REGION 1..7: note = n-mer motif
LTGERIL

SEQ ID NO: 5018 - DNA, 21 bp, synthetic construct
  misc_feature 1..21: note = n-mer motif encoding polynucleotide
  source 1..21: mol_type = other DNA
ctaaccggtgaacgcatactt

SEQ ID NO: 5019 - protein, 7 aa, synthetic construct
  REGION 1..7: note = n-mer motif
PTQGVSM

SEQ ID NO: 5020 - DNA, 21 bp, synthetic construct
  misc_feature 1..21: note = n-mer motif encoding polynucleotide
  source 1..21: mol_type = other DNA
ccaacccaaggagtttcgatg

SEQ ID NO: 5021 - protein, 7 aa, synthetic construct
  REGION 1..7: note = n-mer motif
AAREELN

SEQ ID NO: 5022 - DNA, 21 bp, synthetic construct
  misc_feature 1..21: note = n-mer motif encoding polynucleotide
  source 1..21: mol_type = other DNA
gcggctcgggaggagcttaat

SEQ ID NO: 5023 - protein, 7 aa, synthetic construct
  REGION 1..7: note = n-mer motif
FNGLPAQ

SEQ ID NO: 5024 - DNA, 21 bp, synthetic construct
  misc_feature 1..21: note = n-mer motif encoding polynucleotide
  source 1..21: mol_type = other DNA
ttcaacggtctccccgcacaa

SEQ ID NO: 5025 - protein, 7 aa, synthetic construct
  REGION 1..7: note = n-mer motif
HTIAASM

SEQ ID NO: 5026 - DNA, 21 bp, synthetic construct
  misc_feature 1..21: note = n-mer motif encoding polynucleotide
  source 1..21: mol_type = other DNA
cacaccatagccgcaagtatg

SEQ ID NO: 5027 - protein, 7 aa, synthetic construct
  REGION 1..7: note = n-mer motif
TDAGDGK

SEQ ID NO: 5028 - DNA, 21 bp, synthetic construct
  misc_feature 1..21: note = n-mer motif encoding polynucleotide
  source 1..21: mol_type = other DNA
acagacgcgggggacggcaaa

SEQ ID NO: 5029 - protein, 7 aa, synthetic construct
  REGION 1..7: note = n-mer motif
SDLRPPL

SEQ ID NO: 5030 - DNA, 21 bp, synthetic construct
  misc_feature 1..21: note = n-mer motif encoding polynucleotide
  source 1..21: mol_type = other DNA
tcggatcttcggccgccgctg

SEQ ID NO: 5031 - protein, 7 aa, synthetic construct
  REGION 1..7: note = n-mer motif
AGLSQNL

SEQ ID NO: 5032 - DNA, 21 bp, synthetic construct
  misc_feature 1..21: note = n-mer motif encoding polynucleotide
  source 1..21: mol_type = other DNA
gctgggttgtctcagaatctt

SEQ ID NO: 5033 - protein, 7 aa, synthetic construct
  REGION 1..7: note = n-mer motif
GMGASSK

SEQ ID NO: 5034 - DNA, 21 bp, synthetic construct
  misc_feature 1..21: note = n-mer motif encoding polynucleotide
  source 1..21: mol_type = other DNA
ggtatgggggcgtcttctaag

SEQ ID NO: 5035 - protein, 7 aa, synthetic construct
  REGION 1..7: note = n-mer motif
SQLAELV

SEQ ID NO: 5036 - DNA, 21 bp, synthetic construct
  misc_feature 1..21: note = n-mer motif encoding polynucleotide
  source 1..21: mol_type = other DNA
agtcagttggcggagctggtt

SEQ ID NO: 5037 - protein, 7 aa, synthetic construct
  REGION 1..7: note = n-mer motif
LTRGEEK

SEQ ID NO: 5038 - DNA, 21 bp, synthetic construct
  misc_feature 1..21: note = n-mer motif encoding polynucleotide
  source 1..21: mol_type = other DNA
cttacgaggggtgaggagaag

SEQ ID NO: 5039 - protein, 7 aa, synthetic construct
  REGION 1..7: note = n-mer motif
AGGVILN

SEQ ID NO: 5040 - DNA, 21 bp, synthetic construct
  misc_feature 1..21: note = n-mer motif encoding polynucleotide
  source 1..21: mol_type = other DNA
gcggggggtgttattctgaat

SEQ ID NO: 5041 - protein, 7 aa, synthetic construct
  REGION 1..7: note = n-mer motif
GNGTGVL

SEQ ID NO: 5042 - DNA, 21 bp, synthetic construct
  misc_feature 1..21: note = n-mer motif encoding polynucleotide
  source 1..21: mol_type = other DNA
ggaaacggcaccggggtccta

SEQ ID NO: 5043 - protein, 7 aa, synthetic construct
  REGION 1..7: note = n-mer motif
VVSGIPN

SEQ ID NO: 5044 - DNA, 21 bp, synthetic construct
  misc_feature 1..21: note = n-mer motif encoding polynucleotide
  source 1..21: mol_type = other DNA
gtggtgtctggtattccgaat

SEQ ID NO: 5045 - protein, 7 aa, synthetic construct
  REGION 1..7: note = n-mer motif
GVMAAGI

SEQ ID NO: 5046 - DNA, 21 bp, synthetic construct
  misc_feature 1..21: note = n-mer motif encoding polynucleotide
  source 1..21: mol_type = other DNA
ggagtcatggccgcgggtatc

SEQ ID NO: 5047 - protein, 7 aa, synthetic construct
  REGION 1..7: note = n-mer motif
GVANESP

SEQ ID NO: 5048 - DNA, 21 bp, synthetic construct
  misc_feature 1..21: note = n-mer motif encoding polynucleotide
  source 1..21: mol_type = other DNA
ggtgtggcgaatgagagtccg

SEQ ID NO: 5049 - protein, 7 aa, synthetic construct
  REGION 1..7: note = n-mer motif
ELMASTI

SEQ ID NO: 5050 - DNA, 21 bp, synthetic construct
  misc_feature 1..21: note = n-mer motif encoding polynucleotide
  source 1..21: mol_type = other DNA
gagcttatggcttctactatt

SEQ ID NO: 5051 - protein, 7 aa, synthetic construct
  REGION 1..7: note = n-mer motif
NLGVVQV

SEQ ID NO: 5052 - DNA, 21 bp, synthetic construct
  misc_feature 1..21: note = n-mer motif encoding polynucleotide
  source 1..21: mol_type = other DNA
aacctaggagtcgtacaagtc

SEQ ID NO: 5053 - protein, 7 aa, synthetic construct
  REGION 1..7: note = n-mer motif
RTTPDVP

SEQ ID NO: 5054 - DNA, 21 bp, synthetic construct
  misc_feature 1..21: note = n-mer motif encoding polynucleotide
  source 1..21: mol_type = other DNA
cgtacgactcccgacgtacct

SEQ ID NO: 5055 - protein, 7 aa, synthetic construct
  REGION 1..7: note = n-mer motif
LESLSHH

SEQ ID NO: 5056 - DNA, 21 bp, synthetic construct
  misc_feature 1..21: note = n-mer motif encoding polynucleotide
  source 1..21: mol_type = other DNA
ctggagtcgctttctcatcat

SEQ ID NO: 5057 - protein, 7 aa, synthetic construct
  REGION 1..7: note = n-mer motif
LSLTHGD

SEQ ID NO: 5058 - DNA, 21 bp, synthetic construct
  misc_feature 1..21: note = n-mer motif encoding polynucleotide
  source 1..21: mol_type = other DNA
ctgagtttgactcatggggat

SEQ ID NO: 5059 - protein, 7 aa, synthetic construct
  REGION 1..7: note = n-mer motif
DGVNTAL

SEQ ID NO: 5060 - DNA, 21 bp, synthetic construct
  misc_feature 1..21: note = n-mer motif encoding polynucleotide
  source 1..21: mol_type = other DNA
gatggggttaatacggcgttg

SEQ ID NO: 5061 - protein, 7 aa, synthetic construct
  REGION 1..7: note = n-mer motif
QDGPAEK

SEQ ID NO: 5062 - DNA, 21 bp, synthetic construct
  misc_feature 1..21: note = n-mer motif encoding polynucleotide
  source 1..21: mol_type = other DNA
caggatgggcctgcggagaag

SEQ ID NO: 5063 - protein, 7 aa, synthetic construct
  REGION 1..7: note = n-mer motif
SPAGLGK

SEQ ID NO: 5064 - DNA, 21 bp, synthetic construct
  misc_feature 1..21: note = n-mer motif encoding polynucleotide
  source 1..21: mol_type = other DNA
agccccgcgggcctaggcaaa

SEQ ID NO: 5065 - protein, 7 aa, synthetic construct
  REGION 1..7: note = n-mer motif
RYNDEST

SEQ ID NO: 5066 - DNA, 21 bp, synthetic construct
  misc_feature 1..21: note = n-mer motif encoding polynucleotide
  source 1..21: mol_type = other DNA
agatacaacgacgaatccact

SEQ ID NO: 5067 - protein, 7 aa, synthetic construct
  REGION 1..7: note = n-mer motif
VVAGTNS

SEQ ID NO: 5068 - DNA, 21 bp, synthetic construct
  misc_feature 1..21: note = n-mer motif encoding polynucleotide
  source 1..21: mol_type = other DNA
gtcgttgcaggtacaaactcg

SEQ ID NO: 5069 - protein, 7 aa, synthetic construct
  REGION 1..7: note = n-mer motif
WSGQIHV

SEQ ID NO: 5070 - DNA, 21 bp, synthetic construct
  misc_feature 1..21: note = n-mer motif encoding polynucleotide
  source 1..21: mol_type = other DNA
tggagtggtcagattcatgtg

SEQ ID NO: 5071 - protein, 7 aa, synthetic construct
  REGION 1..7: note = n-mer motif
ANSHTNS

SEQ ID NO: 5072 - DNA, 21 bp, synthetic construct
  misc_feature 1..21: note = n-mer motif encoding polynucleotide
  source 1..21: mol_type = other DNA
gcaaacagtcacaccaactct

SEQ ID NO: 5073 - protein, 7 aa, synthetic construct
  REGION 1..7: note = n-mer motif
VVQAPGR

SEQ ID NO: 5074 - DNA, 21 bp, synthetic construct
  misc_feature 1..21: note = n-mer motif encoding polynucleotide
  source 1..21: mol_type = other DNA
gttgttcaggctcctgggcgt

SEQ ID NO: 5075 - protein, 7 aa, synthetic construct
  REGION 1..7: note = n-mer motif
ATQGTLR

SEQ ID NO: 5076 - DNA, 21 bp, synthetic construct
  misc_feature 1..21: note = n-mer motif encoding polynucleotide
  source 1..21: mol_type = other DNA
gctactcaggggacgcttcgg

SEQ ID NO: 5077 - protein, 7 aa, synthetic construct
  REGION 1..7: note = n-mer motif
RVDPSGL

SEQ ID NO: 5078 - DNA, 21 bp, synthetic construct
  misc_feature 1..21: note = n-mer motif encoding polynucleotide
  source 1..21: mol_type = other DNA
cgtgtggatccttctgggctg

SEQ ID NO: 5079 - protein, 7 aa, synthetic construct
  REGION 1..7: note = n-mer motif
TKDIGVM

SEQ ID NO: 5080 - DNA, 21 bp, synthetic construct
  misc_feature 1..21: note = n-mer motif encoding polynucleotide
  source 1..21: mol_type = other DNA
acgaaagacataggcgtaatg

SEQ ID NO: 5081 - protein, 7 aa, synthetic construct
  REGION 1..7: note = n-mer motif
GGKGEGP

SEQ ID NO: 5082 - DNA, 21 bp, synthetic construct
  misc_feature 1..21: note = n-mer motif encoding polynucleotide
  source 1..21: mol_type = other DNA
ggtgggaagggtgagggtccg

SEQ ID NO: 5083 - protein, 7 aa, synthetic construct
  REGION 1..7: note = n-mer motif
RGAVSTE

SEQ ID NO: 5084 - DNA, 21 bp, synthetic construct
  misc_feature 1..21: note = n-mer motif encoding polynucleotide
  source 1..21: mol_type = other DNA
cggggggctgtgtcgactgag

SEQ ID NO: 5085 - protein, 7 aa, synthetic construct
  REGION 1..7: note = n-mer motif
STDRESR

SEQ ID NO: 5086 - DNA, 21 bp, synthetic construct
  misc_feature 1..21: note = n-mer motif encoding polynucleotide
  source 1..21: mol_type = other DNA
tcgactgatcgggagtcgcgg

SEQ ID NO: 5087 - protein, 7 aa, synthetic construct
  REGION 1..7: note = n-mer motif
NLHTAEA

SEQ ID NO: 5088 - DNA, 21 bp, synthetic construct
  misc_feature 1..21: note = n-mer motif encoding polynucleotide
  source 1..21: mol_type = other DNA
aacctccacactgctgaagcg

SEQ ID NO: 5089 - protein, 7 aa, synthetic construct
  REGION 1..7: note = n-mer motif
MSTAMSL

SEQ ID NO: 5090 - DNA, 21 bp, synthetic construct
  misc_feature 1..21: note = n-mer motif encoding polynucleotide
  source 1..21: mol_type = other DNA
atgtcgacggcgatgagtctg

SEQ ID NO: 5091 - protein, 7 aa, synthetic construct
  REGION 1..7: note = n-mer motif
TGSSAML

SEQ ID NO: 5092 - DNA, 21 bp, synthetic construct
  misc_feature 1..21: note = n-mer motif encoding polynucleotide
  source 1..21: mol_type = other DNA
acggggagttcggcgatgctt

SEQ ID NO: 5093 - protein, 7 aa, synthetic construct
  REGION 1..7: note = n-mer motif
LISGTLR

SEQ ID NO: 5094 - DNA, 21 bp, synthetic construct
  misc_feature 1..21: note = n-mer motif encoding polynucleotide
  source 1..21: mol_type = other DNA
ttgatttctggtacgctgcgt

SEQ ID NO: 5095 - protein, 7 aa, synthetic construct
  REGION 1..7: note = n-mer motif
GIGGVIS

SEQ ID NO: 5096 - DNA, 21 bp, synthetic construct
  misc_feature 1..21: note = n-mer motif encoding polynucleotide
  source 1..21: mol_type = other DNA
ggtattggtggtgtgatttcg

SEQ ID NO: 5097 - protein, 7 aa, synthetic construct
  REGION 1..7: note = n-mer motif
RLENRGV

SEQ ID NO: 5098 - DNA, 21 bp, synthetic construct
  misc_feature 1..21: note = n-mer motif encoding polynucleotide
  source 1..21: mol_type = other DNA
cggttggagaataggggggtt

SEQ ID NO: 5099 - protein, 7 aa, synthetic construct
  REGION 1..7: note = n-mer motif
LPNGGGF

SEQ ID NO: 5100 - DNA, 21 bp, synthetic construct
  misc_feature 1..21: note = n-mer motif encoding polynucleotide
  source 1..21: mol_type = other DNA
ctgccgaatgggggggggttt

SEQ ID NO: 5101 - protein, 7 aa, synthetic construct
  REGION 1..7: note = n-mer motif
TGDRDQN

SEQ ID NO: 5102 - DNA, 21 bp, synthetic construct
  misc_feature 1..21: note = n-mer motif encoding polynucleotide
  source 1..21: mol_type = other DNA
actggtgatcgggatcagaat

SEQ ID NO: 5103 - protein, 7 aa, synthetic construct
  REGION 1..7: note = n-mer motif
SLAITER

SEQ ID NO: 5104 - DNA, 21 bp, synthetic construct
  misc_feature 1..21: note = n-mer motif encoding polynucleotide
  source 1..21: mol_type = other DNA
agtttggcgattactgagcgg

SEQ ID NO: 5105 - protein, 7 aa, synthetic construct
  REGION 1..7: note = n-mer motif
STLISET

SEQ ID NO: 5106 - DNA, 21 bp, synthetic construct
  misc_feature 1..21: note = n-mer motif encoding polynucleotide
  source 1..21: mol_type = other DNA
tccacgttgatatcagaaacc

SEQ ID NO: 5107 - protein, 7 aa, synthetic construct
  REGION 1..7: note = n-mer motif
DVRGSDI

SEQ ID NO: 5108 - DNA, 21 bp, synthetic construct
  misc_feature 1..21: note = n-mer motif encoding polynucleotide
  source 1..21: mol_type = other DNA
gacgtacgggggtctgacatc

SEQ ID NO: 5109 - protein, 7 aa, synthetic construct
  REGION 1..7: note = n-mer motif
NLSLSLR

SEQ ID NO: 5110 - DNA, 21 bp, synthetic construct
  misc_feature 1..21: note = n-mer motif encoding polynucleotide
  source 1..21: mol_type = other DNA
aatctgtctctgtcgttgcgt

SEQ ID NO: 5111 - protein, 7 aa, synthetic construct
  REGION 1..7: note = n-mer motif
GSGGVSV

SEQ ID NO: 5112 - DNA, 21 bp, synthetic construct
  misc_feature 1..21: note = n-mer motif encoding polynucleotide
  source 1..21: mol_type = other DNA
ggttcgggtggtgttagtgtg

SEQ ID NO: 5113 - protein, 7 aa, synthetic construct
  REGION 1..7: note = n-mer motif
LVSGLGP

SEQ ID NO: 5114 - DNA, 21 bp, synthetic construct
  misc_feature 1..21: note = n-mer motif encoding polynucleotide
  source 1..21: mol_type = other DNA
cttgtgagtgggctgggtccg

SEQ ID NO: 5115 - protein, 7 aa, synthetic construct
  REGION 1..7: note = n-mer motif
LTKSTEW

SEQ ID NO: 5116 - DNA, 21 bp, synthetic construct
  misc_feature 1..21: note = n-mer motif encoding polynucleotide
  source 1..21: mol_type = other DNA
ctcaccaaatccacagaatgg

SEQ ID NO: 5117 - protein, 7 aa, synthetic construct
  REGION 1..7: note = n-mer motif
TTRADPA

SEQ ID NO: 5118 - DNA, 21 bp, synthetic construct
  misc_feature 1..21: note = n-mer motif encoding polynucleotide
  source 1..21: mol_type = other DNA
actactcgggctgatcctgcg

SEQ ID NO: 5119 - protein, 7 aa, synthetic construct
  REGION 1..7: note = n-mer motif
ASMSAVN

SEQ ID NO: 5120 - DNA, 21 bp, synthetic construct
  misc_feature 1..21: note = n-mer motif encoding polynucleotide
  source 1..21: mol_type = other DNA
gcatcaatgtcagctgtcaac

SEQ ID NO: 5121 - protein, 7 aa, synthetic construct
  REGION 1..7: note = n-mer motif
RVDSAQP

SEQ ID NO: 5122 - DNA, 21 bp, synthetic construct
  misc_feature 1..21: note = n-mer motif encoding polynucleotide
  source 1..21: mol_type = other DNA
agagtagacagtgcccaaccc

SEQ ID NO: 5123 - protein, 7 aa, synthetic construct
  REGION 1..7: note = n-mer motif
EPSLGSK

SEQ ID NO: 5124 - DNA, 21 bp, synthetic construct
  misc_feature 1..21: note = n-mer motif encoding polynucleotide
  source 1..21: mol_type = other DNA
gaaccaagtctcgggtcgaaa

SEQ ID NO: 5125 - protein, 7 aa, synthetic construct
  REGION 1..7: note = n-mer motif
YLGADAA

SEQ ID NO: 5126 - DNA, 21 bp, synthetic construct
  misc_feature 1..21: note = n-mer motif encoding polynucleotide
  source 1..21: mol_type = other DNA
tatcttggtgctgatgctgct

SEQ ID NO: 5127 - protein, 7 aa, synthetic construct
  REGION 1..7: note = n-mer motif
RDEAYRA

SEQ ID NO: 5128 - DNA, 21 bp, synthetic construct
  misc_feature 1..21: note = n-mer motif encoding polynucleotide
  source 1..21: mol_type = other DNA
agggatgaggcttatcgtgcg

SEQ ID NO: 5129 - protein, 7 aa, synthetic construct
  REGION 1..7: note = n-mer motif
RVAMSVT

SEQ ID NO: 5130 - DNA, 21 bp, synthetic construct
  misc_feature 1..21: note = n-mer motif encoding polynucleotide
  source 1..21: mol_type = other DNA
agggtggcgatgtctgtgacg

SEQ ID NO: 5131 - protein, 7 aa, synthetic construct
  REGION 1..7: note = n-mer motif
SHGSDSN

SEQ ID NO: 5132 - DNA, 21 bp, synthetic construct
  misc_feature 1..21: note = n-mer motif encoding polynucleotide
  source 1..21: mol_type = other DNA
tcgcacggctccgactccaac

SEQ ID NO: 5133 - protein, 7 aa, synthetic construct
  REGION 1..7: note = n-mer motif
ETRMISE

SEQ ID NO: 5134 - DNA, 21 bp, synthetic construct
  misc_feature 1..21: note = n-mer motif encoding polynucleotide
  source 1..21: mol_type = other DNA
gagacgcgtatgatttcggag

SEQ ID NO: 5135 - protein, 7 aa, synthetic construct
  REGION 1..7: note = n-mer motif
AHIGTLT

SEQ ID NO: 5136 - DNA, 21 bp, synthetic construct
  misc_feature 1..21: note = n-mer motif encoding polynucleotide
  source 1..21: mol_type = other DNA
gcacacatcggaactctcacc

SEQ ID NO: 5137 - protein, 7 aa, synthetic construct
  REGION 1..7: note = n-mer motif
MGGVTNP

SEQ ID NO: 5138 - DNA, 21 bp, synthetic construct
  misc_feature 1..21: note = n-mer motif encoding polynucleotide
  source 1..21: mol_type = other DNA
atgggaggtgtcaccaacccc

SEQ ID NO: 5139 - protein, 7 aa, synthetic construct
  REGION 1..7: note = n-mer motif
PSPSVTL

SEQ ID NO: 5140 - DNA, 21 bp, synthetic construct
  misc_feature 1..21: note = n-mer motif encoding polynucleotide
  source 1..21: mol_type = other DNA
ccgtcgcctagtgttactttg

SEQ ID NO: 5141 - protein, 7 aa, synthetic construct
  REGION 1..7: note = n-mer motif
SSSGAAW

SEQ ID NO: 5142 - DNA, 21 bp, synthetic construct
  misc_feature 1..21: note = n-mer motif encoding polynucleotide
  source 1..21: mol_type = other DNA
tcgagtagtggggcggcgtgg

SEQ ID NO: 5143 - protein, 7 aa, synthetic construct
  REGION 1..7: note = n-mer motif
HTQGTLR

SEQ ID NO: 5144 - DNA, 21 bp, synthetic construct
  misc_feature 1..21: note = n-mer motif encoding polynucleotide
  source 1..21: mol_type = other DNA
catactcaggggacgcttcgg

SEQ ID NO: 5145 - protein, 7 aa, synthetic construct
  REGION 1..7: note = n-mer motif
LTDVTQM

SEQ ID NO: 5146 - DNA, 21 bp, synthetic construct
  misc_feature 1..21: note = n-mer motif encoding polynucleotide
  source 1..21: mol_type = other DNA
ttaaccgacgtcacacaaatg

SEQ ID NO: 5147 - protein, 7 aa, synthetic construct
  REGION 1..7: note = n-mer motif
ILSSATD

SEQ ID NO: 5148 - DNA, 21 bp, synthetic construct
  misc_feature 1..21: note = n-mer motif encoding polynucleotide
  source 1..21: mol_type = other DNA
attcttagttcggcgactgat

SEQ ID NO: 5149 - protein, 7 aa, synthetic construct
  REGION 1..7: note = n-mer motif
NGSNDLS

SEQ ID NO: 5150 - DNA, 21 bp, synthetic construct
  misc_feature 1..21: note = n-mer motif encoding polynucleotide
  source 1..21: mol_type = other DNA
aacggtagcaacgacctttca

SEQ ID NO: 5151 - protein, 7 aa, synthetic construct
  REGION 1..7: note = n-mer motif
KGSDNHM

SEQ ID NO: 5152 - DNA, 21 bp, synthetic construct
  misc_feature 1..21: note = n-mer motif encoding polynucleotide
  source 1..21: mol_type = other DNA
aaaggcagtgacaaccacatg

SEQ ID NO: 5153 - protein, 7 aa, synthetic construct
  REGION 1..7: note = n-mer motif
QEQGTTT

SEQ ID NO: 5154 - DNA, 21 bp, synthetic construct
  misc_feature 1..21: note = n-mer motif encoding polynucleotide
  source 1..21: mol_type = other DNA
caggagcagggtacgactact

SEQ ID NO: 5155 - protein, 7 aa, synthetic construct
  REGION 1..7: note = n-mer motif
PGVAMVT

SEQ ID NO: 5156 - DNA, 21 bp, synthetic construct
  misc_feature 1..21: note = n-mer motif encoding polynucleotide
  source 1..21: mol_type = other DNA
cccggggtcgctatggtaact

SEQ ID NO: 5157 - protein, 7 aa, synthetic construct
  REGION 1..7: note = n-mer motif
LVGVSSE

SEQ ID NO: 5158 - DNA, 21 bp, synthetic construct
  misc_feature 1..21: note = n-mer motif encoding polynucleotide
  source 1..21: mol_type = other DNA
ctggtgggtgtgtcgtctgag

SEQ ID NO: 5159 - protein, 7 aa, synthetic construct
  REGION 1..7: note = n-mer motif
SGGTRGP

SEQ ID NO: 5160 - DNA, 21 bp, synthetic construct
  misc_feature 1..21: note = n-mer motif encoding polynucleotide
  source 1..21: mol_type = other DNA
tctggtgggactcgtggtcct

SEQ ID NO: 5161 - protein, 7 aa, synthetic construct
  REGION 1..7: note = n-mer motif
AIQTNDA

SEQ ID NO: 5162 - DNA, 21 bp, synthetic construct
  misc_feature 1..21: note = n-mer motif encoding polynucleotide
  source 1..21: mol_type = other DNA
gcaatccaaaccaacgacgcg

SEQ ID NO: 5163 - protein, 7 aa, synthetic construct
  REGION 1..7: note = n-mer motif
LISTTLR

SEQ ID NO: 5164 - DNA, 21 bp, synthetic construct
  misc_feature 1..21: note = n-mer motif encoding polynucleotide
  source 1..21: mol_type = other DNA
ttgatttctactacgctgcgt

SEQ ID NO: 5165 - protein, 7 aa, synthetic construct
  REGION 1..7: note = n-mer motif
ALGDQAR

SEQ ID NO: 5166 - DNA, 21 bp, synthetic construct
  misc_feature 1..21: note = n-mer motif encoding polynucleotide
  source 1..21: mol_type = other DNA
gcgttaggggaccaagcgcgt

SEQ ID NO: 5167 - protein, 7 aa, synthetic construct
  REGION 1..7: note = n-mer motif
GLNDHVA

SEQ ID NO: 5168 - DNA, 21 bp, synthetic construct
  misc_feature 1..21: note = n-mer motif encoding polynucleotide
  source 1..21: mol_type = other DNA
ggtctgaatgatcatgtggcg

SEQ ID NO: 5169 - protein, 7 aa, synthetic construct
  REGION 1..7: note = n-mer motif
NDVSLAT

SEQ ID NO: 5170 - DNA, 21 bp, synthetic construct
  misc_feature 1..21: note = n-mer motif encoding polynucleotide
  source 1..21: mol_type = other DNA
aatgatgtgagtctggctact

SEQ ID NO: 5171 - protein, 7 aa, synthetic construct
  REGION 1..7: note = n-mer motif
KMAITDD

SEQ ID NO: 5172 - DNA, 21 bp, synthetic construct
  misc_feature 1..21: note = n-mer motif encoding polynucleotide
  source 1..21: mol_type = other DNA
aaaatggctataacagacgac

SEQ ID NO: 5173 - protein, 7 aa, synthetic construct
  REGION 1..7: note = n-mer motif
LSNHGPI

SEQ ID NO: 5174 - DNA, 21 bp, synthetic construct
  misc_feature 1..21: note = n-mer motif encoding polynucleotide
  source 1..21: mol_type = other DNA
ctgagtaatcatgggcctatt

SEQ ID NO: 5175 - protein, 7 aa, synthetic construct
  REGION 1..7: note = n-mer motif
VLNDNLA

SEQ ID NO: 5176 - DNA, 21 bp, synthetic construct
  misc_feature 1..21: note = n-mer motif encoding polynucleotide
  source 1..21: mol_type = other DNA
gtgttaaacgacaacttagct

SEQ ID NO: 5177 - protein, 7 aa, synthetic construct
  REGION 1..7: note = n-mer motif
RHVHVEG

SEQ ID NO: 5178 - DNA, 21 bp, synthetic construct
  misc_feature 1..21: note = n-mer motif encoding polynucleotide
  source 1..21: mol_type = other DNA
cgccacgtacacgtcgaaggc

SEQ ID NO: 5179 - protein, 7 aa, synthetic construct
  REGION 1..7: note = n-mer motif
DGRAELR

SEQ ID NO: 5180 - DNA, 21 bp, synthetic construct
  misc_feature 1..21: note = n-mer motif encoding polynucleotide
  source 1..21: mol_type = other DNA
gatgggcgggcggagttgcgt

SEQ ID NO: 5181 - protein, 7 aa, synthetic construct
  REGION 1..7: note = n-mer motif
SGISFLA

SEQ ID NO: 5182 - DNA, 21 bp, synthetic construct
  misc_feature 1..21: note = n-mer motif encoding polynucleotide
  source 1..21: mol_type = other DNA
agcggaatcagcttcttggct

SEQ ID NO: 5183 - protein, 7 aa, synthetic construct
  REGION 1..7: note = n-mer motif
RISPEGT

SEQ ID NO: 5184 - DNA, 21 bp, synthetic construct
  misc_feature 1..21: note = n-mer motif encoding polynucleotide
  source 1..21: mol_type = other DNA
cgtatatcaccggaaggcact

SEQ ID NO: 5185 - protein, 7 aa, synthetic construct
  REGION 1..7: note = n-mer motif
RVTPTNT

SEQ ID NO: 5186 - DNA, 21 bp, synthetic construct
  misc_feature 1..21: note = n-mer motif encoding polynucleotide
  source 1..21: mol_type = other DNA
cgcgtgacgccaactaacact

SEQ ID NO: 5187 - protein, 7 aa, synthetic construct
  REGION 1..7: note = n-mer motif
STTSSPS

SEQ ID NO: 5188 - DNA, 21 bp, synthetic construct
  misc_feature 1..21: note = n-mer motif encoding polynucleotide
  source 1..21: mol_type = other DNA
tcgaccacctcatcccctagc

SEQ ID NO: 5189 - protein, 7 aa, synthetic construct
  REGION 1..7: note = n-mer motif
LLHGIIA

SEQ ID NO: 5190 - DNA, 21 bp, synthetic construct
  misc_feature 1..21: note = n-mer motif encoding polynucleotide
  source 1..21: mol_type = other DNA
cttttacacggaataatcgcc

SEQ ID NO: 5191 - protein, 7 aa, synthetic construct
  REGION 1..7: note = n-mer motif
ASESSPP

SEQ ID NO: 5192 - DNA, 21 bp, synthetic construct
  misc_feature 1..21: note = n-mer motif encoding polynucleotide
  source 1..21: mol_type = other DNA
gcatcagaatcatcaccaccc

SEQ ID NO: 5193 - protein, 7 aa, synthetic construct
  REGION 1..7: note = n-mer motif
TSREEQW

SEQ ID NO: 5194 - DNA, 21 bp, synthetic construct
  misc_feature 1..21: note = n-mer motif encoding polynucleotide
  source 1..21: mol_type = other DNA
acttctcgtgaggagcagtgg

SEQ ID NO: 5195 - protein, 7 aa, synthetic construct
  REGION 1..7: note = n-mer motif
AGDRDQY

SEQ ID NO: 5196 - DNA, 21 bp, synthetic construct
  misc_feature 1..21: note = n-mer motif encoding polynucleotide
  source 1..21: mol_type = other DNA
gctggtgatcgggatcagtat

SEQ ID NO: 5197 - protein, 7 aa, synthetic construct
  REGION 1..7: note = n-mer motif
GVAIALQ

SEQ ID NO: 5198 - DNA, 21 bp, synthetic construct
  misc_feature 1..21: note = n-mer motif encoding polynucleotide
  source 1..21: mol_type = other DNA
ggggttgctattgctcttcag

SEQ ID NO: 5199 - protein, 7 aa, synthetic construct
  REGION 1..7: note = n-mer motif
LLGGTLA

SEQ ID NO: 5200 - DNA, 21 bp, synthetic construct
  misc_feature 1..21: note = n-mer motif encoding polynucleotide
  source 1..21: mol_type = other DNA
ttgttggggggtactctggct

SEQ ID NO: 5201 - protein, 7 aa, synthetic construct
  REGION 1..7: note = n-mer motif
ALKEYES

SEQ ID NO: 5202 - DNA, 21 bp, synthetic construct
  misc_feature 1..21: note = n-mer motif encoding polynucleotide
  source 1..21: mol_type = other DNA
gcgctgaaggagtatgagtcg

SEQ ID NO: 5203 - protein, 7 aa, synthetic construct
  REGION 1..7: note = n-mer motif
RGGKEEM

SEQ ID NO: 5204 - DNA, 21 bp, synthetic construct
  misc_feature 1..21: note = n-mer motif encoding polynucleotide
  source 1..21: mol_type = other DNA
cgaggtggcaaagaagaaatg

SEQ ID NO: 5205 - protein, 7 aa, synthetic construct
  REGION 1..7: note = n-mer motif
VDFGDHT

SEQ ID NO: 5206 - DNA, 21 bp, synthetic construct
  misc_feature 1..21: note = n-mer motif encoding polynucleotide
  source 1..21: mol_type = other DNA
gtagacttcggcgaccacacc

SEQ ID NO: 5207 - protein, 7 aa, synthetic construct
  REGION 1..7: note = n-mer motif
GADVNNH

SEQ ID NO: 5208 - DNA, 21 bp, synthetic construct
  misc_feature 1..21: note = n-mer motif encoding polynucleotide
  source 1..21: mol_type = other DNA
ggtgctgacgtcaacaaccac

SEQ ID NO: 5209 - protein, 7 aa, synthetic construct
  REGION 1..7: note = n-mer motif
MNGGNVL

SEQ ID NO: 5210 - DNA, 21 bp, synthetic construct
  misc_feature 1..21: note = n-mer motif encoding polynucleotide
  source 1..21: mol_type = other DNA
atgaacggcggcaacgtgctc

SEQ ID NO: 5211 - protein, 7 aa, synthetic construct
  REGION 1..7: note = n-mer motif
HQGDTIV

SEQ ID NO: 5212 - DNA, 21 bp, synthetic construct
  misc_feature 1..21: note = n-mer motif encoding polynucleotide
  source 1..21: mol_type = other DNA
catcagggggatacgattgtg

SEQ ID NO: 5213 - protein, 7 aa, synthetic construct
  REGION 1..7: note = n-mer motif
SHGSDSR

SEQ ID NO: 5214 - DNA, 21 bp, synthetic construct
  misc_feature 1..21: note = n-mer motif encoding polynucleotide
  source 1..21: mol_type = other DNA
agccacgggtcggactcccgg

SEQ ID NO: 5215 - protein, 7 aa, synthetic construct
  REGION 1..7: note = n-mer motif
TGHEGGS

SEQ ID NO: 5216 - DNA, 21 bp, synthetic construct
  misc_feature 1..21: note = n-mer motif encoding polynucleotide
  source 1..21: mol_type = other DNA
acaggccacgaaggaggttcg

SEQ ID NO: 5217 - protein, 7 aa, synthetic construct
  REGION 1..7: note = n-mer motif
PNERHTL

SEQ ID NO: 5218 - DNA, 21 bp, synthetic construct
  misc_feature 1..21: note = n-mer motif encoding polynucleotide
  source 1..21: mol_type = other DNA
cctaacgaacgccacaccttg

SEQ ID NO: 5219 - protein, 7 aa, synthetic construct
  REGION 1..7: note = n-mer motif
TDALLMH

SEQ ID NO: 5220 - DNA, 21 bp, synthetic construct
  misc_feature 1..21: note = n-mer motif encoding polynucleotide
  source 1..21: mol_type = other DNA
acagacgcactcctcatgcac

SEQ ID NO: 5221 - protein, 7 aa, synthetic construct
  REGION 1..7: note = n-mer motif
SVTERSG

SEQ ID NO: 5222 - DNA, 21 bp, synthetic construct
  misc_feature 1..21: note = n-mer motif encoding polynucleotide
  source 1..21: mol_type = other DNA
tctgtgacggagaggagtggt

SEQ ID NO: 5223 - protein, 7 aa, synthetic construct
  REGION 1..7: note = n-mer motif
LGHANGL

SEQ ID NO: 5224 - DNA, 21 bp, synthetic construct
  misc_feature 1..21: note = n-mer motif encoding polynucleotide
  source 1..21: mol_type = other DNA
ttagggcacgcaaacggactt

SEQ ID NO: 5225 - protein, 7 aa, synthetic construct
  REGION 1..7: note = n-mer motif
GVSDFQS

SEQ ID NO: 5226 - DNA, 21 bp, synthetic construct
  misc_feature 1..21: note = n-mer motif encoding polynucleotide
  source 1..21: mol_type = other DNA
ggggtatcggacttccaatca

SEQ ID NO: 5227 - protein, 7 aa, synthetic construct
  REGION 1..7: note = n-mer motif
GVANVSP

SEQ ID NO: 5228 - DNA, 21 bp, synthetic construct
  misc_feature 1..21: note = n-mer motif encoding polynucleotide
  source 1..21: mol_type = other DNA
ggagttgctaacgtcagccca

SEQ ID NO: 5229 - protein, 7 aa, synthetic construct
  REGION 1..7: note = n-mer motif
ATLLPQT

SEQ ID NO: 5230 - DNA, 21 bp, synthetic construct
  misc_feature 1..21: note = n-mer motif encoding polynucleotide
  source 1..21: mol_type = other DNA
gccacacttctgccacaaacg

SEQ ID NO: 5231 - protein, 7 aa, synthetic construct
  REGION 1..7: note = n-mer motif
SSLLTTA

SEQ ID NO: 5232 - DNA, 21 bp, synthetic construct
  misc_feature 1..21: note = n-mer motif encoding polynucleotide
  source 1..21: mol_type = other DNA
tcgtcgttgctgactactgct

SEQ ID NO: 5233 - protein, 7 aa, synthetic construct
  REGION 1..7: note = n-mer motif
LNGAPLL

SEQ ID NO: 5234 - DNA, 21 bp, synthetic construct
  misc_feature 1..21: note = n-mer motif encoding polynucleotide
  source 1..21: mol_type = other DNA
ctgaatggtgcgccgttgctg

SEQ ID NO: 5235 - protein, 7 aa, synthetic construct
  REGION 1..7: note = n-mer motif
SGSIVVV

SEQ ID NO: 5236 - DNA, 21 bp, synthetic construct
  misc_feature 1..21: note = n-mer motif encoding polynucleotide
  source 1..21: mol_type = other DNA
agtggttcgattgtggtggtt

SEQ ID NO: 5237 - protein, 7 aa, synthetic construct
  REGION 1..7: note = n-mer motif
DVAISMR

SEQ ID NO: 5238 - DNA, 21 bp, synthetic construct
  misc_feature 1..21: note = n-mer motif encoding polynucleotide
  source 1..21: mol_type = other DNA
gacgtagcgatatccatgcga

SEQ ID NO: 5239 - protein, 7 aa, synthetic construct
  REGION 1..7: note = n-mer motif
LLADERV

SEQ ID NO: 5240 - DNA, 21 bp, synthetic construct
  misc_feature 1..21: note = n-mer motif encoding polynucleotide
  source 1..21: mol_type = other DNA
ttactcgcagacgaaagggtc

SEQ ID NO: 5241 - protein, 7 aa, synthetic construct
  REGION 1..7: note = n-mer motif
LTSGLAA

SEQ ID NO: 5242 - DNA, 21 bp, synthetic construct
  misc_feature 1..21: note = n-mer motif encoding polynucleotide
  source 1..21: mol_type = other DNA
ttgacgtctggtttggcggcg

SEQ ID NO: 5243 - protein, 7 aa, synthetic construct
  REGION 1..7: note = n-mer motif
GPLNQSL

SEQ ID NO: 5244 - DNA, 21 bp, synthetic construct
  misc_feature 1..21: note = n-mer motif encoding polynucleotide
  source 1..21: mol_type = other DNA
ggtccgctgaatcagtctttg

SEQ ID NO: 5245 - protein, 7 aa, synthetic construct
  REGION 1..7: note = n-mer motif
EGSEHVK

SEQ ID NO: 5246 - DNA, 21 bp, synthetic construct
  misc_feature 1..21: note = n-mer motif encoding polynucleotide
  source 1..21: mol_type = other DNA
gaagggtccgaacacgtgaaa

SEQ ID NO: 5247 - protein, 7 aa, synthetic construct
  REGION 1..7: note = n-mer motif
RQDNSDV

SEQ ID NO: 5248 - DNA, 21 bp, synthetic construct
  misc_feature 1..21: note = n-mer motif encoding polynucleotide
  source 1..21: mol_type = other DNA
cggcaggataattcggatgtg

SEQ ID NO: 5249 - protein, 7 aa, synthetic construct
  REGION 1..7: note = n-mer motif
LGAGSLS

SEQ ID NO: 5250 - DNA, 21 bp, synthetic construct
  misc_feature 1..21: note = n-mer motif encoding polynucleotide
  source 1..21: mol_type = other DNA
ttgggggcggggagtctgtct

SEQ ID NO: 5251 - protein, 7 aa, synthetic construct
  REGION 1..7: note = n-mer motif
KLAEGVR

SEQ ID NO: 5252 - DNA, 21 bp, synthetic construct
  misc_feature 1..21: note = n-mer motif encoding polynucleotide
  source 1..21: mol_type = other DNA
aaactagccgaaggagtgcgg

SEQ ID NO: 5253 - protein, 7 aa, synthetic construct
  REGION 1..7: note = n-mer motif
HGTLESQ

SEQ ID NO: 5254 - DNA, 21 bp, synthetic construct
  misc_feature 1..21: note = n-mer motif encoding polynucleotide
  source 1..21: mol_type = other DNA
cacggcaccctcgaatcgcaa

SEQ ID NO: 5255 - protein, 7 aa, synthetic construct
  REGION 1..7: note = n-mer motif
LDTSDRL

SEQ ID NO: 5256 - DNA, 21 bp, synthetic construct
  misc_feature 1..21: note = n-mer motif encoding polynucleotide
  source 1..21: mol_type = other DNA
ttggacacgtctgaccggctc

SEQ ID NO: 5257 - protein, 7 aa, synthetic construct
  REGION 1..7: note = n-mer motif
VRGEETV

SEQ ID NO: 5258 - DNA, 21 bp, synthetic construct
  misc_feature 1..21: note = n-mer motif encoding polynucleotide
  source 1..21: mol_type = other DNA
gttcgtggggaagaaaccgtc

SEQ ID NO: 5259 - protein, 7 aa, synthetic construct
  REGION 1..7: note = n-mer motif
VVLSLAT

SEQ ID NO: 5260 - DNA, 21 bp, synthetic construct
  misc_feature 1..21: note = n-mer motif encoding polynucleotide
  source 1..21: mol_type = other DNA
gttgtcttaagtctagccact

SEQ ID NO: 5261 - protein, 7 aa, synthetic construct
  REGION 1..7: note = n-mer motif
RDDQGIP

SEQ ID NO: 5262 - DNA, 21 bp, synthetic construct
  misc_feature 1..21: note = n-mer motif encoding polynucleotide
  source 1..21: mol_type = other DNA
cgggatgatcaggggattccg

SEQ ID NO: 5263 - protein, 7 aa, synthetic construct
  REGION 1..7: note = n-mer motif
AVAGTNS

SEQ ID NO: 5264 - DNA, 21 bp, synthetic construct
  misc_feature 1..21: note = n-mer motif encoding polynucleotide
  source 1..21: mol_type = other DNA
gcagttgcgggtacaaactcg

SEQ ID NO: 5265 - protein, 7 aa, synthetic construct
  REGION 1..7: note = n-mer motif
RGGVTTE

SEQ ID NO: 5266 - DNA, 21 bp, synthetic construct
  misc_feature 1..21: note = n-mer motif encoding polynucleotide
  source 1..21: mol_type = other DNA
cgtggaggcgtaaccaccgaa

SEQ ID NO: 5267 - protein, 7 aa, synthetic construct
  REGION 1..7: note = n-mer motif
RMTLTGD

SEQ ID NO: 5268 - DNA, 21 bp, synthetic construct
  misc_feature 1..21: note = n-mer motif encoding polynucleotide
  source 1..21: mol_type = other DNA
cgtatgactttgactggtgat

SEQ ID NO: 5269 - protein, 7 aa, synthetic construct
  REGION 1..7: note = n-mer motif
DDAVSKR

SEQ ID NO: 5270 - DNA, 21 bp, synthetic construct
  misc_feature 1..21: note = n-mer motif encoding polynucleotide
  source 1..21: mol_type = other DNA
gatgatgctgtttctaagcgt

SEQ ID NO: 5271 - protein, 7 aa, synthetic construct
  REGION 1..7: note = n-mer motif
VNHGGVD

SEQ ID NO: 5272 - DNA, 21 bp, synthetic construct
  misc_feature 1..21: note = n-mer motif encoding polynucleotide
  source 1..21: mol_type = other DNA
gtaaaccacggaggagttgac

SEQ ID NO: 5273 - protein, 7 aa, synthetic construct
  REGION 1..7: note = n-mer motif
PGEPLRL

SEQ ID NO: 5274 - DNA, 21 bp, synthetic construct
  misc_feature 1..21: note = n-mer motif encoding polynucleotide
  source 1..21: mol_type = other DNA
ccgggagaacccttgcgactc

SEQ ID NO: 5275 - protein, 7 aa, synthetic construct
  REGION 1..7: note = n-mer motif
PGEHYEA

SEQ ID NO: 5276 - DNA, 21 bp, synthetic construct
  misc_feature 1..21: note = n-mer motif encoding polynucleotide
  source 1..21: mol_type = other DNA
ccgggtgagcattatgaggct

SEQ ID NO: 5277 - protein, 7 aa, synthetic construct
  REGION 1..7: note = n-mer motif
PSQGMTR

SEQ ID NO: 5278 - DNA, 21 bp, synthetic construct
  misc_feature 1..21: note = n-mer motif encoding polynucleotide
  source 1..21: mol_type = other DNA
cctagtcagggtatgactcgt

SEQ ID NO: 5279 - protein, 7 aa, synthetic construct
  REGION 1..7: note = n-mer motif
RASADVV

SEQ ID NO: 5280 - DNA, 21 bp, synthetic construct
  misc_feature 1..21: note = n-mer motif encoding polynucleotide
  source 1..21: mol_type = other DNA
agggcgagtgcggatgttgtg

SEQ ID NO: 5281 - protein, 7 aa, synthetic construct
  REGION 1..7: note = n-mer motif
DAQSRLA

SEQ ID NO: 5282 - DNA, 21 bp, synthetic construct
  misc_feature 1..21: note = n-mer motif encoding polynucleotide
  source 1..21: mol_type = other DNA
gatgctcagtcgcggttggcg

SEQ ID NO: 5283 - protein, 7 aa, synthetic construct
  REGION 1..7: note = n-mer motif
DPSLGSP

SEQ ID NO: 5284 - DNA, 21 bp, synthetic construct
  misc_feature 1..21: note = n-mer motif encoding polynucleotide
  source 1..21: mol_type = other DNA
gatccgtctctgggttctccg

SEQ ID NO: 5285 - protein, 7 aa, synthetic construct
  REGION 1..7: note = n-mer motif
RNVSDMT

SEQ ID NO: 5286 - DNA, 21 bp, synthetic construct
  misc_feature 1..21: note = n-mer motif encoding polynucleotide
  source 1..21: mol_type = other DNA
cgaaacgtgtcggacatgacc

SEQ ID NO: 5287 - protein, 7 aa, synthetic construct
  REGION 1..7: note = n-mer motif
VQSADPR

SEQ ID NO: 5288 - DNA, 21 bp, synthetic construct
  misc_feature 1..21: note = n-mer motif encoding polynucleotide
  source 1..21: mol_type = other DNA
gtccaatccgcggaccctcgc

SEQ ID NO: 5289 - protein, 7 aa, synthetic construct
  REGION 1..7: note = n-mer motif
GVSTLSL

SEQ ID NO: 5290 - DNA, 21 bp, synthetic construct
  misc_feature 1..21: note = n-mer motif encoding polynucleotide
  source 1..21: mol_type = other DNA
ggggtttctactctgagtctt

SEQ ID NO: 5291 - protein, 7 aa, synthetic construct
  REGION 1..7: note = n-mer motif
REQQKAW

SEQ ID NO: 5292 - DNA, 21 bp, synthetic construct
  misc_feature 1..21: note = n-mer motif encoding polynucleotide
  source 1..21: mol_type = other DNA
cgagaacaacaaaaagcctgg

SEQ ID NO: 5293 - protein, 7 aa, synthetic construct
  REGION 1..7: note = n-mer motif
DTASTQS

SEQ ID NO: 5294 - DNA, 21 bp, synthetic construct
  misc_feature 1..21: note = n-mer motif encoding polynucleotide
  source 1..21: mol_type = other DNA
gacacagcatctactcaatcc

SEQ ID NO: 5295 - protein, 7 aa, synthetic construct
  REGION 1..7: note = n-mer motif
MSDSGTV

SEQ ID NO: 5296 - DNA, 21 bp, synthetic construct
  misc_feature 1..21: note = n-mer motif encoding polynucleotide
  source 1..21: mol_type = other DNA
atgagcgactcgggcacggtt

SEQ ID NO: 5297 - protein, 7 aa, synthetic construct
  REGION 1..7: note = n-mer motif
DSRTVDS

SEQ ID NO: 5298 - DNA, 21 bp, synthetic construct
  misc_feature 1..21: note = n-mer motif encoding polynucleotide
  source 1..21: mol_type = other DNA
gactctcgaaccgtcgactca

SEQ ID NO: 5299 - protein, 7 aa, synthetic construct
  REGION 1..7: note = n-mer motif
NSGPQLS

SEQ ID NO: 5300 - DNA, 21 bp, synthetic construct
  misc_feature 1..21: note = n-mer motif encoding polynucleotide
  source 1..21: mol_type = other DNA
aactcgggcccacaactttcg

SEQ ID NO: 5301 - protein, 7 aa, synthetic construct
  REGION 1..7: note = n-mer motif
QKDSLVA

SEQ ID NO: 5302 - DNA, 21 bp, synthetic construct
  misc_feature 1..21: note = n-mer motif encoding polynucleotide
  source 1..21: mol_type = other DNA
cagaaggattcgttggttgct

SEQ ID NO: 5303 - protein, 7 aa, synthetic construct
  REGION 1..7: note = n-mer motif
TLATQEL

SEQ ID NO: 5304 - DNA, 21 bp, synthetic construct
  misc_feature 1..21: note = n-mer motif encoding polynucleotide
  source 1..21: mol_type = other DNA
actctggcgacgcaggagctg

SEQ ID NO: 5305 - protein, 7 aa, synthetic construct
  REGION 1..7: note = n-mer motif
QSMTDGV

SEQ ID NO: 5306 - DNA, 21 bp, synthetic construct
  misc_feature 1..21: note = n-mer motif encoding polynucleotide
  source 1..21: mol_type = other DNA
cagagtatgactgatggggtt

SEQ ID NO: 5307 - protein, 7 aa, synthetic construct
  REGION 1..7: note = n-mer motif
VTVAGSV

SEQ ID NO: 5308 - DNA, 21 bp, synthetic construct
  misc_feature 1..21: note = n-mer motif encoding polynucleotide
  source 1..21: mol_type = other DNA
gttacggtggctggttcggtg

SEQ ID NO: 5309 - protein, 7 aa, synthetic construct
  REGION 1..7: note = n-mer motif
SVVGLDS

SEQ ID NO: 5310 - DNA, 21 bp, synthetic construct
  misc_feature 1..21: note = n-mer motif encoding polynucleotide
  source 1..21: mol_type = other DNA
tcagtcgtcggattagactcg

SEQ ID NO: 5311 - protein, 7 aa, synthetic construct
  REGION 1..7: note = n-mer motif
MNGGHLM

SEQ ID NO: 5312 - DNA, 21 bp, synthetic construct
  misc_feature 1..21: note = n-mer motif encoding polynucleotide
  source 1..21: mol_type = other DNA
atgaatgggggtcatcttatg

SEQ ID NO: 5313 - protein, 7 aa, synthetic construct
  REGION 1..7: note = n-mer motif
DKVVDEV

SEQ ID NO: 5314 - DNA, 21 bp, synthetic construct
  misc_feature 1..21: note = n-mer motif encoding polynucleotide
  source 1..21: mol_type = other DNA
gataaggtggttgatgaggtg

SEQ ID NO: 5315 - protein, 7 aa, synthetic construct
  REGION 1..7: note = n-mer motif
VVGTQDR

SEQ ID NO: 5316 - DNA, 21 bp, synthetic construct
  misc_feature 1..21: note = n-mer motif encoding polynucleotide
  source 1..21: mol_type = other DNA
gttgtggggactcaggatagg

SEQ ID NO: 5317 - protein, 7 aa, synthetic construct
  REGION 1..7: note = n-mer motif
DVAVYIR

SEQ ID NO: 5318 - DNA, 21 bp, synthetic construct
  misc_feature 1..21: note = n-mer motif encoding polynucleotide
  source 1..21: mol_type = other DNA
gatgttgctgtttatattcgt

SEQ ID NO: 5319 - protein, 7 aa, synthetic construct
  REGION 1..7: note = n-mer motif
EPSLGSR

SEQ ID NO: 5320 - DNA, 21 bp, synthetic construct
  misc_feature 1..21: note = n-mer motif encoding polynucleotide
  source 1..21: mol_type = other DNA
gagccgtctctgggttctcgg

SEQ ID NO: 5321 - protein, 7 aa, synthetic construct
  REGION 1..7: note = n-mer motif
ASVSALL

SEQ ID NO: 5322 - DNA, 21 bp, synthetic construct
  misc_feature 1..21: note = n-mer motif encoding polynucleotide
  source 1..21: mol_type = other DNA
gcgagtgtttctgcgttgttg

SEQ ID NO: 5323 - protein, 7 aa, synthetic construct
  REGION 1..7: note = n-mer motif
LSLDRPS

SEQ ID NO: 5324 - DNA, 21 bp, synthetic construct
  misc_feature 1..21: note = n-mer motif encoding polynucleotide
  source 1..21: mol_type = other DNA
ctaagtctagaccgaccctcg

SEQ ID NO: 5325 - protein, 7 aa, synthetic construct
  REGION 1..7: note = n-mer motif
PAIQGNF

SEQ ID NO: 5326 - DNA, 21 bp, synthetic construct
  misc_feature 1..21: note = n-mer motif encoding polynucleotide
  source 1..21: mol_type = other DNA
ccagccatccaaggaaacttc

SEQ ID NO: 5327 - protein, 7 aa, synthetic construct
  REGION 1..7: note = n-mer motif
SVEPLSL

SEQ ID NO: 5328 - DNA, 21 bp, synthetic construct
  misc_feature 1..21: note = n-mer motif encoding polynucleotide
  source 1..21: mol_type = other DNA
tccgtagaacctctatccctc

SEQ ID NO: 5329 - protein, 7 aa, synthetic construct
  REGION 1..7: note = n-mer motif
KSSDTPM

SEQ ID NO: 5330 - DNA, 21 bp, synthetic construct
  misc_feature 1..21: note = n-mer motif encoding polynucleotide
  source 1..21: mol_type = other DNA
aagagttctgatactcctatg

SEQ ID NO: 5331 - protein, 7 aa, synthetic construct
  REGION 1..7: note = n-mer motif
SFDTYGA

SEQ ID NO: 5332 - DNA, 21 bp, synthetic construct
  misc_feature 1..21: note = n-mer motif encoding polynucleotide
  source 1..21: mol_type = other DNA
tccttcgacacttacggggcc

SEQ ID NO: 5333 - protein, 7 aa, synthetic construct
  REGION 1..7: note = n-mer motif
AVSDYAV

SEQ ID NO: 5334 - DNA, 21 bp, synthetic construct
  misc_feature 1..21: note = n-mer motif encoding polynucleotide
  source 1..21: mol_type = other DNA
gcagtatctgactacgcagtc

SEQ ID NO: 5335 - protein, 7 aa, synthetic construct
  REGION 1..7: note = n-mer motif
AGVSASL

SEQ ID NO: 5336 - DNA, 21 bp, synthetic construct
  misc_feature 1..21: note = n-mer motif encoding polynucleotide
  source 1..21: mol_type = other DNA
gcgggtgtttctgcgtcgttg

SEQ ID NO: 5337 - protein, 7 aa, synthetic construct
  REGION 1..7: note = n-mer motif
VVSQLPV

SEQ ID NO: 5338 - DNA, 21 bp, synthetic construct
  misc_feature 1..21: note = n-mer motif encoding polynucleotide
  source 1..21: mol_type = other DNA
gtcgtctctcaactaccggta

SEQ ID NO: 5339 - protein, 7 aa, synthetic construct
  REGION 1..7: note = n-mer motif
EIVLTVP

SEQ ID NO: 5340 - DNA, 21 bp, synthetic construct
  misc_feature 1..21: note = n-mer motif encoding polynucleotide
  source 1..21: mol_type = other DNA
gagattgttttgactgtgccg

SEQ ID NO: 5341 - protein, 7 aa, synthetic construct
  REGION 1..7: note = n-mer motif
MIGGHVQ

SEQ ID NO: 5342 - DNA, 21 bp, synthetic construct
  misc_feature 1..21: note = n-mer motif encoding polynucleotide
  source 1..21: mol_type = other DNA
atgattgggggtcatgttcag

SEQ ID NO: 5343 - protein, 7 aa, synthetic construct
  REGION 1..7: note = n-mer motif
TGLGLMV

SEQ ID NO: 5344 - DNA, 21 bp, synthetic construct
  misc_feature 1..21: note = n-mer motif encoding polynucleotide
  source 1..21: mol_type = other DNA
accggactcggactaatggta

SEQ ID NO: 5345 - protein, 7 aa, synthetic construct
  REGION 1..7: note = n-mer motif
VTTHSPV

SEQ ID NO: 5346 - DNA, 21 bp, synthetic construct
  misc_feature 1..21: note = n-mer motif encoding polynucleotide
  source 1..21: mol_type = other DNA
gttaccacccacagtccagtt

SEQ ID NO: 5347 - protein, 7 aa, synthetic construct
  REGION 1..7: note = n-mer motif
VLPHANT

SEQ ID NO: 5348 - DNA, 21 bp, synthetic construct
  misc_feature 1..21: note = n-mer motif encoding polynucleotide
  source 1..21: mol_type = other DNA
gtcctaccacacgccaacaca

SEQ ID NO: 5349 - protein, 7 aa, synthetic construct
  REGION 1..7: note = n-mer motif
STVLVPK

SEQ ID NO: 5350 - DNA, 21 bp, synthetic construct
  misc_feature 1..21: note = n-mer motif encoding polynucleotide
  source 1..21: mol_type = other DNA
tctaccgtactagtccctaaa

SEQ ID NO: 5351 - protein, 7 aa, synthetic construct
  REGION 1..7: note = n-mer motif
GGDALNQ

SEQ ID NO: 5352 - DNA, 21 bp, synthetic construct
  misc_feature 1..21: note = n-mer motif encoding polynucleotide
  source 1..21: mol_type = other DNA
gggggggacgcccttaaccaa

SEQ ID NO: 5353 - protein, 7 aa, synthetic construct
  REGION 1..7: note = n-mer motif
QIHDTAL

SEQ ID NO: 5354 - DNA, 21 bp, synthetic construct
  misc_feature 1..21: note = n-mer motif encoding polynucleotide
  source 1..21: mol_type = other DNA
caaatccacgacacagcgctc

SEQ ID NO: 5355 - protein, 7 aa, synthetic construct
  REGION 1..7: note = n-mer motif
ALTNGQR

SEQ ID NO: 5356 - DNA, 21 bp, synthetic construct
  misc_feature 1..21: note = n-mer motif encoding polynucleotide
  source 1..21: mol_type = other DNA
gcactaaccaacggtcaacgt

SEQ ID NO: 5357 - protein, 7 aa, synthetic construct
  REGION 1..7: note = n-mer motif
PARYRLW

SEQ ID NO: 5358 - DNA, 21 bp, synthetic construct
  misc_feature 1..21: note = n-mer motif encoding polynucleotide
  source 1..21: mol_type = other DNA
ccggcgcggtatcggctttgg

SEQ ID NO: 5359 - protein, 7 aa, synthetic construct
  REGION 1..7: note = n-mer motif
RNEGINQ

SEQ ID NO: 5360 - DNA, 21 bp, synthetic construct
  misc_feature 1..21: note = n-mer motif encoding polynucleotide
  source 1..21: mol_type = other DNA
cgtaatgagggtattaatcag

SEQ ID NO: 5361 - protein, 7 aa, synthetic construct
  REGION 1..7: note = n-mer motif
QRSDSVM

SEQ ID NO: 5362 - DNA, 21 bp, synthetic construct
  misc_feature 1..21: note = n-mer motif encoding polynucleotide
  source 1..21: mol_type = other DNA
cagcggtcggatagtgtgatg

SEQ ID NO: 5363 - protein, 7 aa, synthetic construct
  REGION 1..7: note = n-mer motif
NRQENSY

SEQ ID NO: 5364 - DNA, 21 bp, synthetic construct
  misc_feature 1..21: note = n-mer motif encoding polynucleotide
  source 1..21: mol_type = other DNA
aatcggcaggagaattcgtat

SEQ ID NO: 5365 - protein, 7 aa, synthetic construct
  REGION 1..7: note = n-mer motif
NDRNTSS

SEQ ID NO: 5366 - DNA, 21 bp, synthetic construct
  misc_feature 1..21: note = n-mer motif encoding polynucleotide
  source 1..21: mol_type = other DNA
aatgataggaatacgtcttcg

SEQ ID NO: 5367 - protein, 7 aa, synthetic construct
  REGION 1..7: note = n-mer motif
MNGGHVL

SEQ ID NO: 5368 - DNA, 21 bp, synthetic construct
  misc_feature 1..21: note = n-mer motif encoding polynucleotide
  source 1..21: mol_type = other DNA
atgaatgggggtcatgttctg

SEQ ID NO: 5369 - protein, 7 aa, synthetic construct
  REGION 1..7: note = n-mer motif
IPATADK

SEQ ID NO: 5370 - DNA, 21 bp, synthetic construct
  misc_feature 1..21: note = n-mer motif encoding polynucleotide
  source 1..21: mol_type = other DNA
atcccagccacggcggacaaa

SEQ ID NO: 5371 - protein, 7 aa, synthetic construct
  REGION 1..7: note = n-mer motif
YAGIAQG

SEQ ID NO: 5372 - DNA, 21 bp, synthetic construct
  misc_feature 1..21: note = n-mer motif encoding polynucleotide
  source 1..21: mol_type = other DNA
tatgcggggattgctcagggt

SEQ ID NO: 5373 - protein, 7 aa, synthetic construct
  REGION 1..7: note = n-mer motif
STQGGLA

SEQ ID NO: 5374 - DNA, 21 bp, synthetic construct
  misc_feature 1..21: note = n-mer motif encoding polynucleotide
  source 1..21: mol_type = other DNA
agtacccaaggcggattagcg

SEQ ID NO: 5375 - protein, 7 aa, synthetic construct
  REGION 1..7: note = n-mer motif
GLLKNLD

SEQ ID NO: 5376 - DNA, 21 bp, synthetic construct
  misc_feature 1..21: note = n-mer motif encoding polynucleotide
  source 1..21: mol_type = other DNA
ggtttgctaaaaaacctcgac

SEQ ID NO: 5377 - protein, 7 aa, synthetic construct
  REGION 1..7: note = n-mer motif
GLVQMSS

SEQ ID NO: 5378 - DNA, 21 bp, synthetic construct
  misc_feature 1..21: note = n-mer motif encoding polynucleotide
  source 1..21: mol_type = other DNA
ggtctggtgcagatgtcttct

SEQ ID NO: 5379 - protein, 7 aa, synthetic construct
  REGION 1..7: note = n-mer motif
GVSVPNV

SEQ ID NO: 5380 - DNA, 21 bp, synthetic construct
  misc_feature 1..21: note = n-mer motif encoding polynucleotide
  source 1..21: mol_type = other DNA
ggggtgagtgtgccgaatgtt

SEQ ID NO: 5381 - protein, 7 aa, synthetic construct
  REGION 1..7: note = n-mer motif
TTSRPEE

SEQ ID NO: 5382 - DNA, 21 bp, synthetic construct
  misc_feature 1..21: note = n-mer motif encoding polynucleotide
  source 1..21: mol_type = other DNA
actacttctcggccggaggag

SEQ ID NO: 5383 - protein, 7 aa, synthetic construct
  REGION 1..7: note = n-mer motif
RDMGALV

SEQ ID NO: 5384 - DNA, 21 bp, synthetic construct
  misc_feature 1..21: note = n-mer motif encoding polynucleotide
  source 1..21: mol_type = other DNA
cgggatatgggtgctcttgtg

SEQ ID NO: 5385 - protein, 7 aa, synthetic construct
  REGION 1..7: note = n-mer motif
VHASSPT

SEQ ID NO: 5386 - DNA, 21 bp, synthetic construct
  misc_feature 1..21: note = n-mer motif encoding polynucleotide
  source 1..21: mol_type = other DNA
gtgcatgcttctagtccgact

SEQ ID NO: 5387 - protein, 7 aa, synthetic construct
  REGION 1..7: note = n-mer motif
REQQKYW

SEQ ID NO: 5388 - DNA, 21 bp, synthetic construct
  misc_feature 1..21: note = n-mer motif encoding polynucleotide
  source 1..21: mol_type = other DNA
cgggaacaacaaaaatactgg

SEQ ID NO: 5389 - protein, 7 aa, synthetic construct
  REGION 1..7: note = n-mer motif
CNAAGCP

SEQ ID NO: 5390 - DNA, 21 bp, synthetic construct
  misc_feature 1..21: note = n-mer motif encoding polynucleotide
  source 1..21: mol_type = other DNA
tgtaatgctgcggggtgtccg

SEQ ID NO: 5391 - protein, 7 aa, synthetic construct
  REGION 1..7: note = n-mer motif
PMRPGVA

SEQ ID NO: 5392 - DNA, 21 bp, synthetic construct
  misc_feature 1..21: note = n-mer motif encoding polynucleotide
  source 1..21: mol_type = other DNA
ccgatgcggccgggtgtggct

SEQ ID NO: 5393 - protein, 7 aa, synthetic construct
  REGION 1..7: note = n-mer motif
FGGVINA

SEQ ID NO: 5394 - DNA, 21 bp, synthetic construct
  misc_feature 1..21: note = n-mer motif encoding polynucleotide
  source 1..21: mol_type = other DNA
ttcgggggagtaataaacgct

SEQ ID NO: 5395 - protein, 7 aa, synthetic construct
  REGION 1..7: note = n-mer motif
STFSTVM

SEQ ID NO: 5396 - DNA, 21 bp, synthetic construct
  misc_feature 1..21: note = n-mer motif encoding polynucleotide
  source 1..21: mol_type = other DNA
agcacattctccactgttatg

SEQ ID NO: 5397 - protein, 7 aa, synthetic construct
  REGION 1..7: note = n-mer motif
GHQNGGI

SEQ ID NO: 5398 - DNA, 21 bp, synthetic construct
  misc_feature 1..21: note = n-mer motif encoding polynucleotide
  source 1..21: mol_type = other DNA
gggcaccaaaacggcggaatc

SEQ ID NO: 5399 - protein, 7 aa, synthetic construct
  REGION 1..7: note = n-mer motif
MTSGNLM

SEQ ID NO: 5400 - DNA, 21 bp, synthetic construct
  misc_feature 1..21: note = n-mer motif encoding polynucleotide
  source 1..21: mol_type = other DNA
atgacctctggcaacctcatg

SEQ ID NO: 5401 - protein, 7 aa, synthetic construct
  REGION 1..7: note = n-mer motif
RESANAD

SEQ ID NO: 5402 - DNA, 21 bp, synthetic construct
  misc_feature 1..21: note = n-mer motif encoding polynucleotide
  source 1..21: mol_type = other DNA
cgtgagtctgcgaatgctgat

SEQ ID NO: 5403 - protein, 7 aa, synthetic construct
  REGION 1..7: note = n-mer motif
SGDVARH

SEQ ID NO: 5404 - DNA, 21 bp, synthetic construct
  misc_feature 1..21: note = n-mer motif encoding polynucleotide
  source 1..21: mol_type = other DNA
tcaggcgacgttgcccgacac

SEQ ID NO: 5405 - protein, 7 aa, synthetic construct
  REGION 1..7: note = n-mer motif
VSANVTI

SEQ ID NO: 5406 - DNA, 21 bp, synthetic construct
  misc_feature 1..21: note = n-mer motif encoding polynucleotide
  source 1..21: mol_type = other DNA
gtttctgcgaatgttacgatt

SEQ ID NO: 5407 - protein, 7 aa, synthetic construct
  REGION 1..7: note = n-mer motif
VPGSTTT

SEQ ID NO: 5408 - DNA, 21 bp, synthetic construct
  misc_feature 1..21: note = n-mer motif encoding polynucleotide
  source 1..21: mol_type = other DNA
gttccaggctcaacgactacc

SEQ ID NO: 5409 - protein, 7 aa, synthetic construct
  REGION 1..7: note = n-mer motif
PLVPQGG

SEQ ID NO: 5410 - DNA, 21 bp, synthetic construct
  misc_feature 1..21: note = n-mer motif encoding polynucleotide
  source 1..21: mol_type = other DNA
cccttagtacctcaaggcggt

SEQ ID NO: 5411 - protein, 7 aa, synthetic construct
  REGION 1..7: note = n-mer motif
PGDRDQY

SEQ ID NO: 5412 - DNA, 21 bp, synthetic construct
  misc_feature 1..21: note = n-mer motif encoding polynucleotide
  source 1..21: mol_type = other DNA
ccaggcgaccgagaccaatac

SEQ ID NO: 5413 - protein, 7 aa, synthetic construct
  REGION 1..7: note = n-mer motif
HVSGASL

SEQ ID NO: 5414 - DNA, 21 bp, synthetic construct
  misc_feature 1..21: note = n-mer motif encoding polynucleotide
  source 1..21: mol_type = other DNA
cacgtgtccggcgccagctta

SEQ ID NO: 5415 - protein, 7 aa, synthetic construct
  REGION 1..7: note = n-mer motif
YTSGTGT

SEQ ID NO: 5416 - DNA, 21 bp, synthetic construct
  misc_feature 1..21: note = n-mer motif encoding polynucleotide
  source 1..21: mol_type = other DNA
tacacctcgggcacagggaca

SEQ ID NO: 5417 - protein, 7 aa, synthetic construct
  REGION 1..7: note = n-mer motif
PNTRDPI

SEQ ID NO: 5418 - DNA, 21 bp, synthetic construct
  misc_feature 1..21: note = n-mer motif encoding polynucleotide
  source 1..21: mol_type = other DNA
cctaatacgcgggatccgatt

SEQ ID NO: 5419 - protein, 7 aa, synthetic construct
  REGION 1..7: note = n-mer motif
SPVGIIA

SEQ ID NO: 5420 - DNA, 21 bp, synthetic construct
  misc_feature 1..21: note = n-mer motif encoding polynucleotide
  source 1..21: mol_type = other DNA
tctcctgtgggtattattgcg

SEQ ID NO: 5421 - protein, 7 aa, synthetic construct
  REGION 1..7: note = n-mer motif
LGDSDET

SEQ ID NO: 5422 - DNA, 21 bp, synthetic construct
  misc_feature 1..21: note = n-mer motif encoding polynucleotide
  source 1..21: mol_type = other DNA
ttaggagactcggacgaaacc

SEQ ID NO: 5423 - protein, 7 aa, synthetic construct
  REGION 1..7: note = n-mer motif
NRHETLS

SEQ ID NO: 5424 - DNA, 21 bp, synthetic construct
  misc_feature 1..21: note = n-mer motif encoding polynucleotide
  source 1..21: mol_type = other DNA
aaccgccacgaaacactatca

SEQ ID NO: 5425 - protein, 7 aa, synthetic construct
  REGION 1..7: note = n-mer motif
GSVSSTK

SEQ ID NO: 5426 - DNA, 21 bp, synthetic construct
  misc_feature 1..21: note = n-mer motif encoding polynucleotide
  source 1..21: mol_type = other DNA
ggctccgtcagttctacgaaa

SEQ ID NO: 5427 - protein, 7 aa, synthetic construct
  REGION 1..7: note = n-mer motif
VFTGTDP

SEQ ID NO: 5428 - DNA, 21 bp, synthetic construct
  misc_feature 1..21: note = n-mer motif encoding polynucleotide
  source 1..21: mol_type = other DNA
gtgttcaccggcacagaccct

SEQ ID NO: 5429 - protein, 7 aa, synthetic construct
  REGION 1..7: note = n-mer motif
YGSNVLS

SEQ ID NO: 5430 - DNA, 21 bp, synthetic construct
  misc_feature 1..21: note = n-mer motif encoding polynucleotide
  source 1..21: mol_type = other DNA
tacggttctaacgtcctctca

SEQ ID NO: 5431 - protein, 7 aa, synthetic construct
  REGION 1..7: note = n-mer motif
TDNGALS

SEQ ID NO: 5432 - DNA, 21 bp, synthetic construct
  misc_feature 1..21: note = n-mer motif encoding polynucleotide
  source 1..21: mol_type = other DNA
actgataatggtgcgttgtcg

SEQ ID NO: 5433 - protein, 7 aa, synthetic construct
  REGION 1..7: note = n-mer motif
TGLGDRA

SEQ ID NO: 5434 - DNA, 21 bp, synthetic construct
  misc_feature 1..21: note = n-mer motif encoding polynucleotide
  source 1..21: mol_type = other DNA
accggcttgggagacagggct

SEQ ID NO: 5435 - protein, 7 aa, synthetic construct
  REGION 1..7: note = n-mer motif
DPSLGYP

SEQ ID NO: 5436 - DNA, 21 bp, synthetic construct
  misc_feature 1..21: note = n-mer motif encoding polynucleotide
  source 1..21: mol_type = other DNA
gaccccagtttgggctaccct

SEQ ID NO: 5437 - protein, 7 aa, synthetic construct
  REGION 1..7: note = n-mer motif
LSLTEGV

SEQ ID NO: 5438 - DNA, 21 bp, synthetic construct
  misc_feature 1..21: note = n-mer motif encoding polynucleotide
  source 1..21: mol_type = other DNA
ctgagtttgactgagggggtt

SEQ ID NO: 5439 - protein, 7 aa, synthetic construct
  REGION 1..7: note = n-mer motif
ARVLEKT

SEQ ID NO: 5440 - DNA, 21 bp, synthetic construct
  misc_feature 1..21: note = n-mer motif encoding polynucleotide
  source 1..21: mol_type = other DNA
gcccgagtccttgaaaaaacc

SEQ ID NO: 5441 - protein, 7 aa, synthetic construct
  REGION 1..7: note = n-mer motif
VDTSARD

SEQ ID NO: 5442 - DNA, 21 bp, synthetic construct
  misc_feature 1..21: note = n-mer motif encoding polynucleotide
  source 1..21: mol_type = other DNA
gttgatactagtgctcgtgat

SEQ ID NO: 5443 - protein, 7 aa, synthetic construct
  REGION 1..7: note = n-mer motif
PTQETLR

SEQ ID NO: 5444 - DNA, 21 bp, synthetic construct
  misc_feature 1..21: note = n-mer motif encoding polynucleotide
  source 1..21: mol_type = other DNA
cctactcaggagacgcttcgg

SEQ ID NO: 5445 - protein, 7 aa, synthetic construct
  REGION 1..7: note = n-mer motif
AALTREI

SEQ ID NO: 5446 - DNA, 21 bp, synthetic construct
  misc_feature 1..21: note = n-mer motif encoding polynucleotide
  source 1..21: mol_type = other DNA
gctgctcttacgcgggagatt

SEQ ID NO: 5447 - protein, 7 aa, synthetic construct
  REGION 1..7: note = n-mer motif
RDLTNDV

SEQ ID NO: 5448 - DNA, 21 bp, synthetic construct
  misc_feature 1..21: note = n-mer motif encoding polynucleotide
  source 1..21: mol_type = other DNA
cgcgacttaactaacgacgtt

SEQ ID NO: 5449 - protein, 7 aa, synthetic construct
  REGION 1..7: note = n-mer motif
GLSERAQ

SEQ ID NO: 5450 - DNA, 21 bp, synthetic construct
  misc_feature 1..21: note = n-mer motif encoding polynucleotide
  source 1..21: mol_type = other DNA
ggcctgtccgaacgagcacaa

SEQ ID NO: 5451 - protein, 7 aa, synthetic construct
  REGION 1..7: note = n-mer motif
DSLLPQT

SEQ ID NO: 5452 - DNA, 21 bp, synthetic construct
  misc_feature 1..21: note = n-mer motif encoding polynucleotide
  source 1..21: mol_type = other DNA
gattctctgcttcctcagact

SEQ ID NO: 5453 - protein, 7 aa, synthetic construct
  REGION 1..7: note = n-mer motif
LEANVSH

SEQ ID NO: 5454 - DNA, 21 bp, synthetic construct
  misc_feature 1..21: note = n-mer motif encoding polynucleotide
  source 1..21: mol_type = other DNA
cttgaggcgaatgtttcgcat

SEQ ID NO: 5455 - protein, 7 aa, synthetic construct
  REGION 1..7: note = n-mer motif
AGSTVTW

SEQ ID NO: 5456 - DNA, 21 bp, synthetic construct
  misc_feature 1..21: note = n-mer motif encoding polynucleotide
  source 1..21: mol_type = other DNA
gcggggtcgactgttacttgg

SEQ ID NO: 5457 - protein, 7 aa, synthetic construct
  REGION 1..7: note = n-mer motif
YGVTLST

SEQ ID NO: 5458 - DNA, 21 bp, synthetic construct
  misc_feature 1..21: note = n-mer motif encoding polynucleotide
  source 1..21: mol_type = other DNA
tacggcgtaaccctctctacc

SEQ ID NO: 5459 - protein, 7 aa, synthetic construct
  REGION 1..7: note = n-mer motif
GPSGAGI

SEQ ID NO: 5460 - DNA, 21 bp, synthetic construct
  misc_feature 1..21: note = n-mer motif encoding polynucleotide
  source 1..21: mol_type = other DNA
gggccatcaggggcaggcatc

SEQ ID NO: 5461 - protein, 7 aa, synthetic construct
  REGION 1..7: note = n-mer motif
VSNGHFV

SEQ ID NO: 5462 - DNA, 21 bp, synthetic construct
  misc_feature 1..21: note = n-mer motif encoding polynucleotide
  source 1..21: mol_type = other DNA
gttagtaatgggcattttgtt

SEQ ID NO: 5463 - protein, 7 aa, synthetic construct
  REGION 1..7: note = n-mer motif
GVSLPMS

SEQ ID NO: 5464 - DNA, 21 bp, synthetic construct
  misc_feature 1..21: note = n-mer motif encoding polynucleotide
  source 1..21: mol_type = other DNA
ggcgtatcactacccatgagc

SEQ ID NO: 5465 - protein, 7 aa, synthetic construct
  REGION 1..7: note = n-mer motif
MAASVTL

SEQ ID NO: 5466 - DNA, 21 bp, synthetic construct
  misc_feature 1..21: note = n-mer motif encoding polynucleotide
  source 1..21: mol_type = other DNA
atggcggctagtgttacgctt

SEQ ID NO: 5467 - protein, 7 aa, synthetic construct
  REGION 1..7: note = n-mer motif
KIGENAS

SEQ ID NO: 5468 - DNA, 21 bp, synthetic construct
  misc_feature 1..21: note = n-mer motif encoding polynucleotide
  source 1..21: mol_type = other DNA
aagattggtgagaatgcttct

SEQ ID NO: 5469 - protein, 7 aa, synthetic construct
  REGION 1..7: note = n-mer motif
ISMTLLP

SEQ ID NO: 5470 - DNA, 21 bp, synthetic construct
  misc_feature 1..21: note = n-mer motif encoding polynucleotide
  source 1..21: mol_type = other DNA
atttcgatgactctgctgccg

SEQ ID NO: 5471 - protein, 7 aa, synthetic construct
  REGION 1..7: note = n-mer motif
GAVSSTK

SEQ ID NO: 5472 - DNA, 21 bp, synthetic construct
  misc_feature 1..21: note = n-mer motif encoding polynucleotide
  source 1..21: mol_type = other DNA
ggtgctgtttcttcgactaag

SEQ ID NO: 5473 - protein, 7 aa, synthetic construct
  REGION 1..7: note = n-mer motif
TTLAHPA

SEQ ID NO: 5474 - DNA, 21 bp, synthetic construct
  misc_feature 1..21: note = n-mer motif encoding polynucleotide
  source 1..21: mol_type = other DNA
actactctggctcatcctgcg

SEQ ID NO: 5475 - protein, 7 aa, synthetic construct
  REGION 1..7: note = n-mer motif
LMNDLLS

SEQ ID NO: 5476 - DNA, 21 bp, synthetic construct
  misc_feature 1..21: note = n-mer motif encoding polynucleotide
  source 1..21: mol_type = other DNA
cttatgaacgacttactctcc

SEQ ID NO: 5477 - protein, 7 aa, synthetic construct
  REGION 1..7: note = n-mer motif
TTAANVR

SEQ ID NO: 5478 - DNA, 21 bp, synthetic construct
  misc_feature 1..21: note = n-mer motif encoding polynucleotide
  source 1..21: mol_type = other DNA
acgacggcggctaatgttagg

SEQ ID NO: 5479 - protein, 7 aa, synthetic construct
  REGION 1..7: note = n-mer motif
PNDRLTV

SEQ ID NO: 5480 - DNA, 21 bp, synthetic construct
  misc_feature 1..21: note = n-mer motif encoding polynucleotide
  source 1..21: mol_type = other DNA
ccaaacgaccggttgacggtt

SEQ ID NO: 5481 - protein, 7 aa, synthetic construct
  REGION 1..7: note = n-mer motif
LQVEQVM

SEQ ID NO: 5482 - DNA, 21 bp, synthetic construct
  misc_feature 1..21: note = n-mer motif encoding polynucleotide
  source 1..21: mol_type = other DNA
cttcaggttgagcaggttatg

SEQ ID NO: 5483 - protein, 7 aa, synthetic construct
  REGION 1..7: note = n-mer motif
MLMGAET

SEQ ID NO: 5484 - DNA, 21 bp, synthetic construct
  misc_feature 1..21: note = n-mer motif encoding polynucleotide
  source 1..21: mol_type = other DNA
atgctcatgggggcagaaact

SEQ ID NO: 5485 - protein, 7 aa, synthetic construct
  REGION 1..7: note = n-mer motif
LSLTMPA

SEQ ID NO: 5486 - DNA, 21 bp, synthetic construct
  misc_feature 1..21: note = n-mer motif encoding polynucleotide
  source 1..21: mol_type = other DNA
ctctcgcttacaatgcctgcc

SEQ ID NO: 5487 - protein, 7 aa, synthetic construct
  REGION 1..7: note = n-mer motif
KEIHVSV

SEQ ID NO: 5488 - DNA, 21 bp, synthetic construct
  misc_feature 1..21: note = n-mer motif encoding polynucleotide
  source 1..21: mol_type = other DNA
aaggagattcatgtgtcggtt

SEQ ID NO: 5489 - protein, 7 aa, synthetic construct
  REGION 1..7: note = n-mer motif
MAVDVTK

SEQ ID NO: 5490 - DNA, 21 bp, synthetic construct
  misc_feature 1..21: note = n-mer motif encoding polynucleotide
  source 1..21: mol_type = other DNA
atggcagtcgacgtaaccaaa

SEQ ID NO: 5491 - protein, 7 aa, synthetic construct
  REGION 1..7: note = n-mer motif
NSLATMV

SEQ ID NO: 5492 - DNA, 21 bp, synthetic construct
  misc_feature 1..21: note = n-mer motif encoding polynucleotide
  source 1..21: mol_type = other DNA
aatagtctggcgacgatggtg

SEQ ID NO: 5493 - protein, 7 aa, synthetic construct
  REGION 1..7: note = n-mer motif
RSISGDW

SEQ ID NO: 5494 - DNA, 21 bp, synthetic construct
  misc_feature 1..21: note = n-mer motif encoding polynucleotide
  source 1..21: mol_type = other DNA
cgttccataagtggcgactgg

SEQ ID NO: 5495 - protein, 7 aa, synthetic construct
  REGION 1..7: note = n-mer motif
SLQQANT

SEQ ID NO: 5496 - DNA, 21 bp, synthetic construct
  misc_feature 1..21: note = n-mer motif encoding polynucleotide
  source 1..21: mol_type = other DNA
tcgcttcagcaggctaatacg

SEQ ID NO: 5497 - protein, 7 aa, synthetic construct
  REGION 1..7: note = n-mer motif
PTTNPLL

SEQ ID NO: 5498 - DNA, 21 bp, synthetic construct
  misc_feature 1..21: note = n-mer motif encoding polynucleotide
  source 1..21: mol_type = other DNA
ccgactactaatccgcttctg

SEQ ID NO: 5499 - protein, 7 aa, synthetic construct
  REGION 1..7: note = n-mer motif
ADVLIRG

SEQ ID NO: 5500 - DNA, 21 bp, synthetic construct
  misc_feature 1..21: note = n-mer motif encoding polynucleotide
  source 1..21: mol_type = other DNA
gcggacgtgctcatacgcggt

SEQ ID NO: 5501 - protein, 7 aa, synthetic construct
  REGION 1..7: note = n-mer motif
HVASAGA

SEQ ID NO: 5502 - DNA, 21 bp, synthetic construct
  misc_feature 1..21: note = n-mer motif encoding polynucleotide
  source 1..21: mol_type = other DNA
catgttgcttcggcgggggcg

SEQ ID NO: 5503 - protein, 7 aa, synthetic construct
  REGION 1..7: note = n-mer motif
LQDRTTL

SEQ ID NO: 5504 - DNA, 21 bp, synthetic construct
  misc_feature 1..21: note = n-mer motif encoding polynucleotide
  source 1..21: mol_type = other DNA
ctccaagaccgcactactctc

SEQ ID NO: 5505 - protein, 7 aa, synthetic construct
  REGION 1..7: note = n-mer motif
NAHDTET

SEQ ID NO: 5506 - DNA, 21 bp, synthetic construct
  misc_feature 1..21: note = n-mer motif encoding polynucleotide
  source 1..21: mol_type = other DNA
aatgcgcatgatactgagact

SEQ ID NO: 5507 - protein, 7 aa, synthetic construct
  REGION 1..7: note = n-mer motif
RVDSALL

SEQ ID NO: 5508 - DNA, 21 bp, synthetic construct
  misc_feature 1..21: note = n-mer motif encoding polynucleotide
  source 1..21: mol_type = other DNA
agagtagacagcgctctttta

SEQ ID NO: 5509 - protein, 7 aa, synthetic construct
  REGION 1..7: note = n-mer motif
RNQGSES

SEQ ID NO: 5510 - DNA, 21 bp, synthetic construct
  misc_feature 1..21: note = n-mer motif encoding polynucleotide
  source 1..21: mol_type = other DNA
cgtaatcagggtagtgagagt

SEQ ID NO: 5511 - protein, 7 aa, synthetic construct
  REGION 1..7: note = n-mer motif
EIMSSNR

SEQ ID NO: 5512 - DNA, 21 bp, synthetic construct
  misc_feature 1..21: note = n-mer motif encoding polynucleotide
  source 1..21: mol_type = other DNA
gaaatcatgtcgtccaaccgt

SEQ ID NO: 5513 - protein, 7 aa, synthetic construct
  REGION 1..7: note = n-mer motif
GSRENAR

SEQ ID NO: 5514 - DNA, 21 bp, synthetic construct
  misc_feature 1..21: note = n-mer motif encoding polynucleotide
  source 1..21: mol_type = other DNA
gggagtagggagaatgcgcgt

SEQ ID NO: 5515 - protein, 7 aa, synthetic construct
  REGION 1..7: note = n-mer motif
GGDTSRS

SEQ ID NO: 5516 - DNA, 21 bp, synthetic construct
  misc_feature 1..21: note = n-mer motif encoding polynucleotide
  source 1..21: mol_type = other DNA
gggggtgatacgagtcgtagt

SEQ ID NO: 5517 - protein, 7 aa, synthetic construct
  REGION 1..7: note = n-mer motif
YLALTGI

SEQ ID NO: 5518 - DNA, 21 bp, synthetic construct
  misc_feature 1..21: note = n-mer motif encoding polynucleotide
  source 1..21: mol_type = other DNA
tatcttgcgcttacggggatt

SEQ ID NO: 5519 - protein, 7 aa, synthetic construct
  REGION 1..7: note = n-mer motif
LDTSARL

SEQ ID NO: 5520 - DNA, 21 bp, synthetic construct
  misc_feature 1..21: note = n-mer motif encoding polynucleotide
  source 1..21: mol_type = other DNA
cttgatactagtgctcgtctt

SEQ ID NO: 5521 - protein, 7 aa, synthetic construct
  REGION 1..7: note = n-mer motif
LLTLTQA

SEQ ID NO: 5522 - DNA, 21 bp, synthetic construct
  misc_feature 1..21: note = n-mer motif encoding polynucleotide
  source 1..21: mol_type = other DNA
ctgctcaccctgactcaagcg

SEQ ID NO: 5523 - protein, 7 aa, synthetic construct
  REGION 1..7: note = n-mer motif
SEQNKVW

SEQ ID NO: 5524 - DNA, 21 bp, synthetic construct
  misc_feature 1..21: note = n-mer motif encoding polynucleotide
  source 1..21: mol_type = other DNA
tccgaacaaaacaaagtatgg

SEQ ID NO: 5525 - protein, 7 aa, synthetic construct
  REGION 1..7: note = n-mer motif
ADAAHAL

SEQ ID NO: 5526 - DNA, 21 bp, synthetic construct
  misc_feature 1..21: note = n-mer motif encoding polynucleotide
  source 1..21: mol_type = other DNA
gcggacgcagcccacgcgctc

SEQ ID NO: 5527 - protein, 7 aa, synthetic construct
  REGION 1..7: note = n-mer motif
GVAATNS

SEQ ID NO: 5528 - DNA, 21 bp, synthetic construct
  misc_feature 1..21: note = n-mer motif encoding polynucleotide
  source 1..21: mol_type = other DNA
ggggtggctgcgacgaattct

SEQ ID NO: 5529 - protein, 7 aa, synthetic construct
  REGION 1..7: note = n-mer motif
NSGSMHT

SEQ ID NO: 5530 - DNA, 21 bp, synthetic construct
  misc_feature 1..21: note = n-mer motif encoding polynucleotide
  source 1..21: mol_type = other DNA
aactcaggaagcatgcacact

SEQ ID NO: 5531 - protein, 7 aa, synthetic construct
  REGION 1..7: note = n-mer motif
PDGAAPM

SEQ ID NO: 5532 - DNA, 21 bp, synthetic construct
  misc_feature 1..21: note = n-mer motif encoding polynucleotide
  source 1..21: mol_type = other DNA
cctgatggtgcggctcctatg

SEQ ID NO: 5533 - protein, 7 aa, synthetic construct
  REGION 1..7: note = n-mer motif
STLASPR

SEQ ID NO: 5534 - DNA, 21 bp, synthetic construct
  misc_feature 1..21: note = n-mer motif encoding polynucleotide
  source 1..21: mol_type = other DNA
tcaaccctagcctcgcctcga

SEQ ID NO: 5535 - protein, 7 aa, synthetic construct
  REGION 1..7: note = n-mer motif
GADDAAL

SEQ ID NO: 5536 - DNA, 21 bp, synthetic construct
  misc_feature 1..21: note = n-mer motif encoding polynucleotide
  source 1..21: mol_type = other DNA
ggagccgacgacgcagccctc

SEQ ID NO: 5537 - protein, 7 aa, synthetic construct
  REGION 1..7: note = n-mer motif
AGASAEA

SEQ ID NO: 5538 - DNA, 21 bp, synthetic construct
  misc_feature 1..21: note = n-mer motif encoding polynucleotide
  source 1..21: mol_type = other DNA
gctggggctagtgctgaggcg

SEQ ID NO: 5539 - protein, 7 aa, synthetic construct
  REGION 1..7: note = n-mer motif
SRLEYIG

SEQ ID NO: 5540 - DNA, 21 bp, synthetic construct
  misc_feature 1..21: note = n-mer motif encoding polynucleotide
  source 1..21: mol_type = other DNA
agccgccttgaatacatcggg

SEQ ID NO: 5541 - protein, 7 aa, synthetic construct
  REGION 1..7: note = n-mer motif
YTVGSLA

SEQ ID NO: 5542 - DNA, 21 bp, synthetic construct
  misc_feature 1..21: note = n-mer motif encoding polynucleotide
  source 1..21: mol_type = other DNA
tacaccgttggctcactcgcc

SEQ ID NO: 5543 - protein, 7 aa, synthetic construct
  REGION 1..7: note = n-mer motif
LVHLGTS

SEQ ID NO: 5544 - DNA, 21 bp, synthetic construct
  misc_feature 1..21: note = n-mer motif encoding polynucleotide
  source 1..21: mol_type = other DNA
ttggttcatcttgggacttct

SEQ ID NO: 5545 - protein, 7 aa, synthetic construct
  REGION 1..7: note = n-mer motif
GLYDAAT

SEQ ID NO: 5546 - DNA, 21 bp, synthetic construct
  misc_feature 1..21: note = n-mer motif encoding polynucleotide
  source 1..21: mol_type = other DNA
gggctttatgatgcggcgact

SEQ ID NO: 5547 - protein, 7 aa, synthetic construct
  REGION 1..7: note = n-mer motif
KNGGHDL

SEQ ID NO: 5548 - DNA, 21 bp, synthetic construct
  misc_feature 1..21: note = n-mer motif encoding polynucleotide
  source 1..21: mol_type = other DNA
aaaaacggtgggcacgaccta

SEQ ID NO: 5549 - protein, 7 aa, synthetic construct
  REGION 1..7: note = n-mer motif
NTENASR

SEQ ID NO: 5550 - DNA, 21 bp, synthetic construct
  misc_feature 1..21: note = n-mer motif encoding polynucleotide
  source 1..21: mol_type = other DNA
aatactgagaatgcgtcgcgg

SEQ ID NO: 5551 - protein, 7 aa, synthetic construct
  REGION 1..7: note = n-mer motif
HGTLVSQ

SEQ ID NO: 5552 - DNA, 21 bp, synthetic construct
  misc_feature 1..21: note = n-mer motif encoding polynucleotide
  source 1..21: mol_type = other DNA
catgggactttggtgtctcag

SEQ ID NO: 5553 - protein, 7 aa, synthetic construct
  REGION 1..7: note = n-mer motif
HAGLGVT

SEQ ID NO: 5554 - DNA, 21 bp, synthetic construct
  misc_feature 1..21: note = n-mer motif encoding polynucleotide
  source 1..21: mol_type = other DNA
catgctggtcttggtgttact

SEQ ID NO: 5555 - protein, 7 aa, synthetic construct
  REGION 1..7: note = n-mer motif
PSYQGNG

SEQ ID NO: 5556 - DNA, 21 bp, synthetic construct
  misc_feature 1..21: note = n-mer motif encoding polynucleotide
  source 1..21: mol_type = other DNA
ccgagttatcaggggaatggt

SEQ ID NO: 5557 - protein, 7 aa, synthetic construct
  REGION 1..7: note = n-mer motif
MGDNYAR

SEQ ID NO: 5558 - DNA, 21 bp, synthetic construct
  misc_feature 1..21: note = n-mer motif encoding polynucleotide
  source 1..21: mol_type = other DNA
atgggtgataattatgctcgg

SEQ ID NO: 5559 - protein, 7 aa, synthetic construct
  REGION 1..7: note = n-mer motif
LEKDPMT

SEQ ID NO: 5560 - DNA, 21 bp, synthetic construct
  misc_feature 1..21: note = n-mer motif encoding polynucleotide
  source 1..21: mol_type = other DNA
ttggaaaaagaccctatgact

SEQ ID NO: 5561 - protein, 7 aa, synthetic construct
  REGION 1..7: note = n-mer motif
SMNGTSL

SEQ ID NO: 5562 - DNA, 21 bp, synthetic construct
  misc_feature 1..21: note = n-mer motif encoding polynucleotide
  source 1..21: mol_type = other DNA
agtatgaatgggactagtctt

SEQ ID NO: 5563 - protein, 7 aa, synthetic construct
  REGION 1..7: note = n-mer motif
SNLGNTS

SEQ ID NO: 5564 - DNA, 21 bp, synthetic construct
  misc_feature 1..21: note = n-mer motif encoding polynucleotide
  source 1..21: mol_type = other DNA
agtaaccttggaaacacctcg

SEQ ID NO: 5565 - protein, 7 aa, synthetic construct
  REGION 1..7: note = n-mer motif
GSGAGLH

SEQ ID NO: 5566 - DNA, 21 bp, synthetic construct
  misc_feature 1..21: note = n-mer motif encoding polynucleotide
  source 1..21: mol_type = other DNA
ggaagtggagctggccttcac

SEQ ID NO: 5567 - protein, 7 aa, synthetic construct
  REGION 1..7: note = n-mer motif
LANTVVT

SEQ ID NO: 5568 - DNA, 21 bp, synthetic construct
  misc_feature 1..21: note = n-mer motif encoding polynucleotide
  source 1..21: mol_type = other DNA
cttgctaatacggttgtgacg

SEQ ID NO: 5569 - protein, 7 aa, synthetic construct
  REGION 1..7: note = n-mer motif
AVRENGI

SEQ ID NO: 5570 - DNA, 21 bp, synthetic construct
  misc_feature 1..21: note = n-mer motif encoding polynucleotide
  source 1..21: mol_type = other DNA
gccgttcgggaaaacggcata

SEQ ID NO: 5571 - protein, 7 aa, synthetic construct
  REGION 1..7: note = n-mer motif
VTELTRF

SEQ ID NO: 5572 - DNA, 21 bp, synthetic construct
  misc_feature 1..21: note = n-mer motif encoding polynucleotide
  source 1..21: mol_type = other DNA
gtgactgagcttacgcggttt

SEQ ID NO: 5573 - protein, 7 aa, synthetic construct
  REGION 1..7: note = n-mer motif
RNLDLNH

SEQ ID NO: 5574 - DNA, 21 bp, synthetic construct
  misc_feature 1..21: note = n-mer motif encoding polynucleotide
  source 1..21: mol_type = other DNA
aggaatcttgatctgaatcat

SEQ ID NO: 5575 - protein, 7 aa, synthetic construct
  REGION 1..7: note = n-mer motif
ALASTQT

SEQ ID NO: 5576 - DNA, 21 bp, synthetic construct
  misc_feature 1..21: note = n-mer motif encoding polynucleotide
  source 1..21: mol_type = other DNA
gcactagcatcgacccaaact

SEQ ID NO: 5577 - protein, 7 aa, synthetic construct
  REGION 1..7: note = n-mer motif
FISGALT

SEQ ID NO: 5578 - DNA, 21 bp, synthetic construct
  misc_feature 1..21: note = n-mer motif encoding polynucleotide
  source 1..21: mol_type = other DNA
ttcatatccggcgccttaact

SEQ ID NO: 5579 - protein, 7 aa, synthetic construct
  REGION 1..7: note = n-mer motif
QSQTAVA

SEQ ID NO: 5580 - DNA, 21 bp, synthetic construct
  misc_feature 1..21: note = n-mer motif encoding polynucleotide
  source 1..21: mol_type = other DNA
cagtctcagacggctgttgct

SEQ ID NO: 5581 - protein, 7 aa, synthetic construct
  REGION 1..7: note = n-mer motif
VSSQLPM

SEQ ID NO: 5582 - DNA, 21 bp, synthetic construct
  misc_feature 1..21: note = n-mer motif encoding polynucleotide
  source 1..21: mol_type = other DNA
gtgtcgtctcagttgccgatg

SEQ ID NO: 5583 - protein, 7 aa, synthetic construct
  REGION 1..7: note = n-mer motif
VIALTEA

SEQ ID NO: 5584 - DNA, 21 bp, synthetic construct
  misc_feature 1..21: note = n-mer motif encoding polynucleotide
  source 1..21: mol_type = other DNA
gtgattgcgttgacggaggct

SEQ ID NO: 5585 - protein, 7 aa, synthetic construct
  REGION 1..7: note = n-mer motif
TTVEVSG

SEQ ID NO: 5586 - DNA, 21 bp, synthetic construct
  misc_feature 1..21: note = n-mer motif encoding polynucleotide
  source 1..21: mol_type = other DNA
acaaccgtagaagtaagcggc

SEQ ID NO: 5587 - protein, 7 aa, synthetic construct
  REGION 1..7: note = n-mer motif
GVAGTNS

SEQ ID NO: 5588 - DNA, 21 bp, synthetic construct
  misc_feature 1..21: note = n-mer motif encoding polynucleotide
  source 1..21: mol_type = other DNA
ggagttgcgggaacaaactcc

SEQ ID NO: 5589 - protein, 7 aa, synthetic construct
  REGION 1..7: note = n-mer motif
RESGEQA

SEQ ID NO: 5590 - DNA, 21 bp, synthetic construct
  misc_feature 1..21: note = n-mer motif encoding polynucleotide
  source 1..21: mol_type = other DNA
agggagagtggggagcaggct

SEQ ID NO: 5591 - protein, 7 aa, synthetic construct
  REGION 1..7: note = n-mer motif
HIVLSHA

SEQ ID NO: 5592 - DNA, 21 bp, synthetic construct
  misc_feature 1..21: note = n-mer motif encoding polynucleotide
  source 1..21: mol_type = other DNA
catattgtgctgagtcatgct

SEQ ID NO: 5593 - protein, 7 aa, synthetic construct
  REGION 1..7: note = n-mer motif
ILGVYSD

SEQ ID NO: 5594 - DNA, 21 bp, synthetic construct
  misc_feature 1..21: note = n-mer motif encoding polynucleotide
  source 1..21: mol_type = other DNA
atactgggcgtttactccgac

SEQ ID NO: 5595 - protein, 7 aa, synthetic construct
  REGION 1..7: note = n-mer motif
QGGTTLR

SEQ ID NO: 5596 - DNA, 21 bp, synthetic construct
  misc_feature 1..21: note = n-mer motif encoding polynucleotide
  source 1..21: mol_type = other DNA
caaggggggactactctacgc

SEQ ID NO: 5597 - protein, 7 aa, synthetic construct
  REGION 1..7: note = n-mer motif
YHTEKMF

SEQ ID NO: 5598 - DNA, 21 bp, synthetic construct
  misc_feature 1..21: note = n-mer motif encoding polynucleotide
  source 1..21: mol_type = other DNA
taccacaccgaaaaaatgttc

SEQ ID NO: 5599 - protein, 7 aa, synthetic construct
  REGION 1..7: note = n-mer motif
LEVGALR

SEQ ID NO: 5600 - DNA, 21 bp, synthetic construct
  misc_feature 1..21: note = n-mer motif encoding polynucleotide
  source 1..21: mol_type = other DNA
ctggaagtaggcgcacttcgt

SEQ ID NO: 5601 - protein, 7 aa, synthetic construct
  REGION 1..7: note = n-mer motif
GFGLTED

SEQ ID NO: 5602 - DNA, 21 bp, synthetic construct
  misc_feature 1..21: note = n-mer motif encoding polynucleotide
  source 1..21: mol_type = other DNA
gggtttgggttgacggaggat

SEQ ID NO: 5603 - protein, 7 aa, synthetic construct
  REGION 1..7: note = n-mer motif
PLKGGGE

SEQ ID NO: 5604 - DNA, 21 bp, synthetic construct
  misc_feature 1..21: note = n-mer motif encoding polynucleotide
  source 1..21: mol_type = other DNA
ccgttgaaaggcgggggtgaa

SEQ ID NO: 5605 - protein, 7 aa, synthetic construct
  REGION 1..7: note = n-mer motif
GLVHMPS

SEQ ID NO: 5606 - DNA, 21 bp, synthetic construct
  misc_feature 1..21: note = n-mer motif encoding polynucleotide
  source 1..21: mol_type = other DNA
ggcttagttcacatgccctca

SEQ ID NO: 5607 - protein, 7 aa, synthetic construct
  REGION 1..7: note = n-mer motif
VTGHPTL

SEQ ID NO: 5608 - DNA, 21 bp, synthetic construct
  misc_feature 1..21: note = n-mer motif encoding polynucleotide
  source 1..21: mol_type = other DNA
gttacgggtcatccgactctt

SEQ ID NO: 5609 - protein, 7 aa, synthetic construct
  REGION 1..7: note = n-mer motif
WNHSTTV

SEQ ID NO: 5610 - DNA, 21 bp, synthetic construct
  misc_feature 1..21: note = n-mer motif encoding polynucleotide
  source 1..21: mol_type = other DNA
tggaaccactccacgacagtc

SEQ ID NO: 5611 - protein, 7 aa, synthetic construct
  REGION 1..7: note = n-mer motif
PGEHYRL

SEQ ID NO: 5612 - DNA, 21 bp, synthetic construct
  misc_feature 1..21: note = n-mer motif encoding polynucleotide
  source 1..21: mol_type = other DNA
cctggagaacactacagattg

SEQ ID NO: 5613 - protein, 7 aa, synthetic construct
  REGION 1..7: note = n-mer motif
LSLTDLV

SEQ ID NO: 5614 - DNA, 21 bp, synthetic construct
  misc_feature 1..21: note = n-mer motif encoding polynucleotide
  source 1..21: mol_type = other DNA
ctgagtttgactgatttggtt

SEQ ID NO: 5615 - protein, 7 aa, synthetic construct
  REGION 1..7: note = n-mer motif
GTGSTNV

SEQ ID NO: 5616 - DNA, 21 bp, synthetic construct
  misc_feature 1..21: note = n-mer motif encoding polynucleotide
  source 1..21: mol_type = other DNA
ggaactggatcgacaaacgtt

SEQ ID NO: 5617 - protein, 7 aa, synthetic construct
  REGION 1..7: note = n-mer motif
LSKEHAP

SEQ ID NO: 5618 - DNA, 21 bp, synthetic construct
  misc_feature 1..21: note = n-mer motif encoding polynucleotide
  source 1..21: mol_type = other DNA
ttgagtaaggagcatgctcct

SEQ ID NO: 5619 - protein, 7 aa, synthetic construct
  REGION 1..7: note = n-mer motif
LGDSAEA

SEQ ID NO: 5620 - DNA, 21 bp, synthetic construct
  misc_feature 1..21: note = n-mer motif encoding polynucleotide
  source 1..21: mol_type = other DNA
cttggggattctgctgaggcg

SEQ ID NO: 5621 - protein, 7 aa, synthetic construct
  REGION 1..7: note = n-mer motif
GPRNSID

SEQ ID NO: 5622 - DNA, 21 bp, synthetic construct
  misc_feature 1..21: note = n-mer motif encoding polynucleotide
  source 1..21: mol_type = other DNA
ggcccacgtaactctatcgac

SEQ ID NO: 5623 - protein, 7 aa, synthetic construct
  REGION 1..7: note = n-mer motif
LVRGLTT

SEQ ID NO: 5624 - DNA, 21 bp, synthetic construct
  misc_feature 1..21: note = n-mer motif encoding polynucleotide
  source 1..21: mol_type = other DNA
ttggttcgtggtcttacgact

SEQ ID NO: 5625 - protein, 7 aa, synthetic construct
  REGION 1..7: note = n-mer motif
REVSPLM

SEQ ID NO: 5626 - DNA, 21 bp, synthetic construct
  misc_feature 1..21: note = n-mer motif encoding polynucleotide
  source 1..21: mol_type = other DNA
cgagaagtaagccccctgatg

SEQ ID NO: 5627 - protein, 7 aa, synthetic construct
  REGION 1..7: note = n-mer motif
IMPSVTK

SEQ ID NO: 5628 - DNA, 21 bp, synthetic construct
  misc_feature 1..21: note = n-mer motif encoding polynucleotide
  source 1..21: mol_type = other DNA
ataatgccctctgttacaaaa

SEQ ID NO: 5629 - protein, 7 aa, synthetic construct
  REGION 1..7: note = n-mer motif
WNSEVSV

SEQ ID NO: 5630 - DNA, 21 bp, synthetic construct
  misc_feature 1..21: note = n-mer motif encoding polynucleotide
  source 1..21: mol_type = other DNA
tggaacagtgaagtttcggtg

SEQ ID NO: 5631 - protein, 7 aa, synthetic construct
  REGION 1..7: note = n-mer motif
FHGSDSK

SEQ ID NO: 5632 - DNA, 21 bp, synthetic construct
  misc_feature 1..21: note = n-mer motif encoding polynucleotide
  source 1..21: mol_type = other DNA
tttcatggttctgattcgaag

SEQ ID NO: 5633 - protein, 7 aa, synthetic construct
  REGION 1..7: note = n-mer motif
PNERLTQ

SEQ ID NO: 5634 - DNA, 21 bp, synthetic construct
  misc_feature 1..21: note = n-mer motif encoding polynucleotide
  source 1..21: mol_type = other DNA
ccgaatgagaggcttactcag

SEQ ID NO: 5635 - protein, 7 aa, synthetic construct
  REGION 1..7: note = n-mer motif
GQEETGW

SEQ ID NO: 5636 - DNA, 21 bp, synthetic construct
  misc_feature 1..21: note = n-mer motif encoding polynucleotide
  source 1..21: mol_type = other DNA
gggcaggaggagaccggctgg

SEQ ID NO: 5637 - protein, 7 aa, synthetic construct
  REGION 1..7: note = n-mer motif
MVTTTNT

SEQ ID NO: 5638 - DNA, 21 bp, synthetic construct
  misc_feature 1..21: note = n-mer motif encoding polynucleotide
  source 1..21: mol_type = other DNA
atggtgacgaccacaaacacc

SEQ ID NO: 5639 - protein, 7 aa, synthetic construct
  REGION 1..7: note = n-mer motif
NALGDGY

SEQ ID NO: 5640 - DNA, 21 bp, synthetic construct
  misc_feature 1..21: note = n-mer motif encoding polynucleotide
  source 1..21: mol_type = other DNA
aacgcgctgggcgacggctac

SEQ ID NO: 5641 - protein, 7 aa, synthetic construct
  REGION 1..7: note = n-mer motif
LGDSAET

SEQ ID NO: 5642 - DNA, 21 bp, synthetic construct
  misc_feature 1..21: note = n-mer motif encoding polynucleotide
  source 1..21: mol_type = other DNA
cttggggattctgctgagacg

SEQ ID NO: 5643 - protein, 7 aa, synthetic construct
  REGION 1..7: note = n-mer motif
TGAHTEV

SEQ ID NO: 5644 - DNA, 21 bp, synthetic construct
  misc_feature 1..21: note = n-mer motif encoding polynucleotide
  source 1..21: mol_type = other DNA
accggagcacacaccgaagtc

SEQ ID NO: 5645 - protein, 7 aa, synthetic construct
  REGION 1..7: note = n-mer motif
LVGNPST

SEQ ID NO: 5646 - DNA, 21 bp, synthetic construct
  misc_feature 1..21: note = n-mer motif encoding polynucleotide
  source 1..21: mol_type = other DNA
ctcgtgggcaacccgagtacg

SEQ ID NO: 5647 - protein, 7 aa, synthetic construct
  REGION 1..7: note = n-mer motif
FPSMSGK

SEQ ID NO: 5648 - DNA, 21 bp, synthetic construct
  misc_feature 1..21: note = n-mer motif encoding polynucleotide
  source 1..21: mol_type = other DNA
ttcccaagcatgtcggggaaa

SEQ ID NO: 5649 - protein, 7 aa, synthetic construct
  REGION 1..7: note = n-mer motif
KGSDTPL

SEQ ID NO: 5650 - DNA, 21 bp, synthetic construct
  misc_feature 1..21: note = n-mer motif encoding polynucleotide
  source 1..21: mol_type = other DNA
aagggttctgatactcctttg

SEQ ID NO: 5651 - protein, 7 aa, synthetic construct
  REGION 1..7: note = n-mer motif
ANLGESV

SEQ ID NO: 5652 - DNA, 21 bp, synthetic construct
  misc_feature 1..21: note = n-mer motif encoding polynucleotide
  source 1..21: mol_type = other DNA
gccaacctcggtgaatccgtg

SEQ ID NO: 5653 - protein, 7 aa, synthetic construct
  REGION 1..7: note = n-mer motif
SVDSGLR

SEQ ID NO: 5654 - DNA, 21 bp, synthetic construct
  misc_feature 1..21: note = n-mer motif encoding polynucleotide
  source 1..21: mol_type = other DNA
agtgttgatagtgggctgcgt

SEQ ID NO: 5655 - protein, 7 aa, synthetic construct
  REGION 1..7: note = n-mer motif
RTMGDST

SEQ ID NO: 5656 - DNA, 21 bp, synthetic construct
  misc_feature 1..21: note = n-mer motif encoding polynucleotide
  source 1..21: mol_type = other DNA
cggacaatgggtgacagtacg

SEQ ID NO: 5657 - protein, 7 aa, synthetic construct
  REGION 1..7: note = n-mer motif
SLAISQR

SEQ ID NO: 5658 - DNA, 21 bp, synthetic construct
  misc_feature 1..21: note = n-mer motif encoding polynucleotide
  source 1..21: mol_type = other DNA
agcctggctataagccaacgt

SEQ ID NO: 5659 - protein, 7 aa, synthetic construct
  REGION 1..7: note = n-mer motif
SEISLSR

SEQ ID NO: 5660 - DNA, 21 bp, synthetic construct
  misc_feature 1..21: note = n-mer motif encoding polynucleotide
  source 1..21: mol_type = other DNA
tctgagattagtctgtctcgg

SEQ ID NO: 5661 - protein, 7 aa, synthetic construct
  REGION 1..7: note = n-mer motif
LRGTENQ

SEQ ID NO: 5662 - DNA, 21 bp, synthetic construct
  misc_feature 1..21: note = n-mer motif encoding polynucleotide
  source 1..21: mol_type = other DNA
ttgcgtgggacggagaatcag

SEQ ID NO: 5663 - protein, 7 aa, synthetic construct
  REGION 1..7: note = n-mer motif
SGHVTAL

SEQ ID NO: 5664 - DNA, 21 bp, synthetic construct
  misc_feature 1..21: note = n-mer motif encoding polynucleotide
  source 1..21: mol_type = other DNA
agtggacacgtcacagcttta

SEQ ID NO: 5665 - protein, 7 aa, synthetic construct
  REGION 1..7: note = n-mer motif
REISILS

SEQ ID NO: 5666 - DNA, 21 bp, synthetic construct
  misc_feature 1..21: note = n-mer motif encoding polynucleotide
  source 1..21: mol_type = other DNA
cgcgaaatatcgatactatct

SEQ ID NO: 5667 - protein, 7 aa, synthetic construct
  REGION 1..7: note = n-mer motif
ASTDFKM

SEQ ID NO: 5668 - DNA, 21 bp, synthetic construct
  misc_feature 1..21: note = n-mer motif encoding polynucleotide
  source 1..21: mol_type = other DNA
gctagtactgattttaagatg

SEQ ID NO: 5669 - protein, 7 aa, synthetic construct
  REGION 1..7: note = n-mer motif
GNSGDHF

SEQ ID NO: 5670 - DNA, 21 bp, synthetic construct
  misc_feature 1..21: note = n-mer motif encoding polynucleotide
  source 1..21: mol_type = other DNA
ggtaactctggtgaccacttc

SEQ ID NO: 5671 - protein, 7 aa, synthetic construct
  REGION 1..7: note = n-mer motif
AADSSVR

SEQ ID NO: 5672 - DNA, 21 bp, synthetic construct
  misc_feature 1..21: note = n-mer motif encoding polynucleotide
  source 1..21: mol_type = other DNA
gctgctgacagcagcgttaga

SEQ ID NO: 5673 - protein, 7 aa, synthetic construct
  REGION 1..7: note = n-mer motif
QADSHGR

SEQ ID NO: 5674 - DNA, 21 bp, synthetic construct
  misc_feature 1..21: note = n-mer motif encoding polynucleotide
  source 1..21: mol_type = other DNA
caagccgactcgcacggccgt

SEQ ID NO: 5675 - protein, 7 aa, synthetic construct
  REGION 1..7: note = n-mer motif
ADYGTSS

SEQ ID NO: 5676 - DNA, 21 bp, synthetic construct
  misc_feature 1..21: note = n-mer motif encoding polynucleotide
  source 1..21: mol_type = other DNA
gcggactacggtaccagctct

SEQ ID NO: 5677 - protein, 7 aa, synthetic construct
  REGION 1..7: note = n-mer motif
SGGVESK

SEQ ID NO: 5678 - DNA, 21 bp, synthetic construct
  misc_feature 1..21: note = n-mer motif encoding polynucleotide
  source 1..21: mol_type = other DNA
tctggtggtgttgagtcgaag

SEQ ID NO: 5679 - protein, 7 aa, synthetic construct
  REGION 1..7: note = n-mer motif
GNLLLTA

SEQ ID NO: 5680 - DNA, 21 bp, synthetic construct
  misc_feature 1..21: note = n-mer motif encoding polynucleotide
  source 1..21: mol_type = other DNA
ggtaatttgctgcttactgct

SEQ ID NO: 5681 - protein, 7 aa, synthetic construct
  REGION 1..7: note = n-mer motif
MTDRHRV

SEQ ID NO: 5682 - DNA, 21 bp, synthetic construct
  misc_feature 1..21: note = n-mer motif encoding polynucleotide
  source 1..21: mol_type = other DNA
atgaccgaccgtcacagggtc

SEQ ID NO: 5683 - protein, 7 aa, synthetic construct
  REGION 1..7: note = n-mer motif
MENAPGR

SEQ ID NO: 5684 - DNA, 21 bp, synthetic construct
  misc_feature 1..21: note = n-mer motif encoding polynucleotide
  source 1..21: mol_type = other DNA
atggagaatgctcctgggagg

SEQ ID NO: 5685 - protein, 7 aa, synthetic construct
  REGION 1..7: note = n-mer motif
EANHTGY

SEQ ID NO: 5686 - DNA, 21 bp, synthetic construct
  misc_feature 1..21: note = n-mer motif encoding polynucleotide
  source 1..21: mol_type = other DNA
gaagccaaccacaccggatac

SEQ ID NO: 5687 - protein, 7 aa, synthetic construct
  REGION 1..7: note = n-mer motif
AADRSVR

SEQ ID NO: 5688 - DNA, 21 bp, synthetic construct
  misc_feature 1..21: note = n-mer motif encoding polynucleotide
  source 1..21: mol_type = other DNA
gcagcagaccgctccgtacgt

SEQ ID NO: 5689 - protein, 7 aa, synthetic construct
  REGION 1..7: note = n-mer motif
PIIEHAV

SEQ ID NO: 5690 - DNA, 21 bp, synthetic construct
  misc_feature 1..21: note = n-mer motif encoding polynucleotide
  source 1..21: mol_type = other DNA
cccataatagaacacgcagta

SEQ ID NO: 5691 - protein, 7 aa, synthetic construct
  REGION 1..7: note = n-mer motif
NVDTSVR

SEQ ID NO: 5692 - DNA, 21 bp, synthetic construct
  misc_feature 1..21: note = n-mer motif encoding polynucleotide
  source 1..21: mol_type = other DNA
aatgttgatacgagtgtgcgg

SEQ ID NO: 5693 - protein, 7 aa, synthetic construct
  REGION 1..7: note = n-mer motif
NVTATLG

SEQ ID NO: 5694 - DNA, 21 bp, synthetic construct
  misc_feature 1..21: note = n-mer motif encoding polynucleotide
  source 1..21: mol_type = other DNA
aacgtcacagcaacgctgggt

SEQ ID NO: 5695 - protein, 7 aa, synthetic construct
  REGION 1..7: note = n-mer motif
MKTQIEL

SEQ ID NO: 5696 - DNA, 21 bp, synthetic construct
  misc_feature 1..21: note = n-mer motif encoding polynucleotide
  source 1..21: mol_type = other DNA
atgaaaacgcaaatagaactc

SEQ ID NO: 5697 - protein, 7 aa, synthetic construct
  REGION 1..7: note = n-mer motif
IGPRREV

SEQ ID NO: 5698 - DNA, 21 bp, synthetic construct
  misc_feature 1..21: note = n-mer motif encoding polynucleotide
  source 1..21: mol_type = other DNA
ataggacctcgccgtgaagta

SEQ ID NO: 5699 - protein, 7 aa, synthetic construct
  REGION 1..7: note = n-mer motif
VLAAVDR

SEQ ID NO: 5700 - DNA, 21 bp, synthetic construct
  misc_feature 1..21: note = n-mer motif encoding polynucleotide
  source 1..21: mol_type = other DNA
gtccttgctgccgtcgaccga

SEQ ID NO: 5701 - protein, 7 aa, synthetic construct
  REGION 1..7: note = n-mer motif
SVDSGLL

SEQ ID NO: 5702 - DNA, 21 bp, synthetic construct
  misc_feature 1..21: note = n-mer motif encoding polynucleotide
  source 1..21: mol_type = other DNA
agtgttgatagtgggctgctt

SEQ ID NO: 5703 - protein, 7 aa, synthetic construct
  REGION 1..7: note = n-mer motif
FIVGNGS

SEQ ID NO: 5704 - DNA, 21 bp, synthetic construct
  misc_feature 1..21: note = n-mer motif encoding polynucleotide
  source 1..21: mol_type = other DNA
ttcatcgtaggcaacggaagt

SEQ ID NO: 5705 - protein, 7 aa, synthetic construct
  REGION 1..7: note = n-mer motif
RYNVETA

SEQ ID NO: 5706 - DNA, 21 bp, synthetic construct
  misc_feature 1..21: note = n-mer motif encoding polynucleotide
  source 1..21: mol_type = other DNA
cggtataatgttgagactgcg

SEQ ID NO: 5707 - protein, 7 aa, synthetic construct
  REGION 1..7: note = n-mer motif
AIVSIAQ

SEQ ID NO: 5708 - DNA, 21 bp, synthetic construct
  misc_feature 1..21: note = n-mer motif encoding polynucleotide
  source 1..21: mol_type = other DNA
gcgattgtgtcgattgctcag

SEQ ID NO: 5709 - protein, 7 aa, synthetic construct
  REGION 1..7: note = n-mer motif
PDNNPRN

SEQ ID NO: 5710 - DNA, 21 bp, synthetic construct
  misc_feature 1..21: note = n-mer motif encoding polynucleotide
  source 1..21: mol_type = other DNA
cctgataataatccgcggaat

SEQ ID NO: 5711 - protein, 7 aa, synthetic construct
  REGION 1..7: note = n-mer motif
KTVNVSV

SEQ ID NO: 5712 - DNA, 21 bp, synthetic construct
  misc_feature 1..21: note = n-mer motif encoding polynucleotide
  source 1..21: mol_type = other DNA
aagactgtgaatgttagtgtt

SEQ ID NO: 5713 - protein, 7 aa, synthetic construct
  REGION 1..7: note = n-mer motif
QFHENIR

SEQ ID NO: 5714 - DNA, 21 bp, synthetic construct
  misc_feature 1..21: note = n-mer motif encoding polynucleotide
  source 1..21: mol_type = other DNA
cagtttcatgagaatattcgt

SEQ ID NO: 5715 - protein, 7 aa, synthetic construct
  REGION 1..7: note = n-mer motif
KGYDTPM

SEQ ID NO: 5716 - DNA, 21 bp, synthetic construct
  misc_feature 1..21: note = n-mer motif encoding polynucleotide
  source 1..21: mol_type = other DNA
aaaggctacgacacacccatg

SEQ ID NO: 5717 - protein, 7 aa, synthetic construct
  REGION 1..7: note = n-mer motif
AVITEPK

SEQ ID NO: 5718 - DNA, 21 bp, synthetic construct
  misc_feature 1..21: note = n-mer motif encoding polynucleotide
  source 1..21: mol_type = other DNA
gcggtgattactgagcctaag

SEQ ID NO: 5719 - protein, 7 aa, synthetic construct
  REGION 1..7: note = n-mer motif
VSSTGEW

SEQ ID NO: 5720 - DNA, 21 bp, synthetic construct
  misc_feature 1..21: note = n-mer motif encoding polynucleotide
  source 1..21: mol_type = other DNA
gttagttctacgggggagtgg

SEQ ID NO: 5721 - protein, 7 aa, synthetic construct
  REGION 1..7: note = n-mer motif
TGSIPSP

SEQ ID NO: 5722 - DNA, 21 bp, synthetic construct
  misc_feature 1..21: note = n-mer motif encoding polynucleotide
  source 1..21: mol_type = other DNA
accggttcaatcccttccccc

SEQ ID NO: 5723 - protein, 7 aa, synthetic construct
  REGION 1..7: note = n-mer motif
NQSAELV

SEQ ID NO: 5724 - DNA, 21 bp, synthetic construct
  misc_feature 1..21: note = n-mer motif encoding polynucleotide
  source 1..21: mol_type = other DNA
aatcagtcggcggagctggtt

SEQ ID NO: 5725 - protein, 7 aa, synthetic construct
  REGION 1..7: note = n-mer motif
VIGGLGI

SEQ ID NO: 5726 - DNA, 21 bp, synthetic construct
  misc_feature 1..21: note = n-mer motif encoding polynucleotide
  source 1..21: mol_type = other DNA
gttattggtgggcttgggatt

SEQ ID NO: 5727 - protein, 7 aa, synthetic construct
  REGION 1..7: note = n-mer motif
HFSSETS

SEQ ID NO: 5728 - DNA, 21 bp, synthetic construct
  misc_feature 1..21: note = n-mer motif encoding polynucleotide
  source 1..21: mol_type = other DNA
cacttctcttccgaaacttct

SEQ ID NO: 5729 - protein, 7 aa, synthetic construct
  REGION 1..7: note = n-mer motif
GYRGVVD

SEQ ID NO: 5730 - DNA, 21 bp, synthetic construct
  misc_feature 1..21: note = n-mer motif encoding polynucleotide
  source 1..21: mol_type = other DNA
ggttataggggggttgtggat

SEQ ID NO: 5731 - protein, 7 aa, synthetic construct
  REGION 1..7: note = n-mer motif
SHGTDTK

SEQ ID NO: 5732 - DNA, 21 bp, synthetic construct
  misc_feature 1..21: note = n-mer motif encoding polynucleotide
  source 1..21: mol_type = other DNA
agccacggaacggacaccaaa

SEQ ID NO: 5733 - protein, 7 aa, synthetic construct
  REGION 1..7: note = n-mer motif
VMASPGP

SEQ ID NO: 5734 - DNA, 21 bp, synthetic construct
  misc_feature 1..21: note = n-mer motif encoding polynucleotide
  source 1..21: mol_type = other DNA
gttatggcttcgcctggtcct

SEQ ID NO: 5735 - protein, 7 aa, synthetic construct
  REGION 1..7: note = n-mer motif
LPNGGGL

SEQ ID NO: 5736 - DNA, 21 bp, synthetic construct
  misc_feature 1..21: note = n-mer motif encoding polynucleotide
  source 1..21: mol_type = other DNA
ctgccgaatggggggggtttg

SEQ ID NO: 5737 - protein, 7 aa, synthetic construct
  REGION 1..7: note = n-mer motif
VGSVTDS

SEQ ID NO: 5738 - DNA, 21 bp, synthetic construct
  misc_feature 1..21: note = n-mer motif encoding polynucleotide
  source 1..21: mol_type = other DNA
gttggtagcgtaaccgactcc

SEQ ID NO: 5739 - protein, 7 aa, synthetic construct
  REGION 1..7: note = n-mer motif
TVMTSEP

SEQ ID NO: 5740 - DNA, 21 bp, synthetic construct
  misc_feature 1..21: note = n-mer motif encoding polynucleotide
  source 1..21: mol_type = other DNA
acagttatgaccagcgaacct

SEQ ID NO: 5741 - protein, 7 aa, synthetic construct
  REGION 1..7: note = n-mer motif
PGNGTMV

SEQ ID NO: 5742 - DNA, 21 bp, synthetic construct
  misc_feature 1..21: note = n-mer motif encoding polynucleotide
  source 1..21: mol_type = other DNA
cctggtaacggcactatggtg

SEQ ID NO: 5743 - protein, 7 aa, synthetic construct
  REGION 1..7: note = n-mer motif
SLGALVA

SEQ ID NO: 5744 - DNA, 21 bp, synthetic construct
  misc_feature 1..21: note = n-mer motif encoding polynucleotide
  source 1..21: mol_type = other DNA
tcgctgggtgctctggttgct

SEQ ID NO: 5745 - protein, 7 aa, synthetic construct
  REGION 1..7: note = n-mer motif
YLVTADN

SEQ ID NO: 5746 - DNA, 21 bp, synthetic construct
  misc_feature 1..21: note = n-mer motif encoding polynucleotide
  source 1..21: mol_type = other DNA
tatttggttactgctgataat

SEQ ID NO: 5747 - protein, 7 aa, synthetic construct
  REGION 1..7: note = n-mer motif
LTHLRVS

SEQ ID NO: 5748 - DNA, 21 bp, synthetic construct
  misc_feature 1..21: note = n-mer motif encoding polynucleotide
  source 1..21: mol_type = other DNA
ctgactcaccttcgtgtcagc

SEQ ID NO: 5749 - protein, 7 aa, synthetic construct
  REGION 1..7: note = n-mer motif
HTVGSYV

SEQ ID NO: 5750 - DNA, 21 bp, synthetic construct
  misc_feature 1..21: note = n-mer motif encoding polynucleotide
  source 1..21: mol_type = other DNA
catacggttgggagttatgtt

SEQ ID NO: 5751 - protein, 7 aa, synthetic construct
  REGION 1..7: note = n-mer motif
LEDRSAS

SEQ ID NO: 5752 - DNA, 21 bp, synthetic construct
  misc_feature 1..21: note = n-mer motif encoding polynucleotide
  source 1..21: mol_type = other DNA
ttggaggatcggtcggctagt

SEQ ID NO: 5753 - protein, 7 aa, synthetic construct
  REGION 1..7: note = n-mer motif
VTTASPV

SEQ ID NO: 5754 - DNA, 21 bp, synthetic construct
  misc_feature 1..21: note = n-mer motif encoding polynucleotide
  source 1..21: mol_type = other DNA
gtgactacggcttctcctgtg

SEQ ID NO: 5755 - protein, 7 aa, synthetic construct
  REGION 1..7: note = n-mer motif
GVLGQTD

SEQ ID NO: 5756 - DNA, 21 bp, synthetic construct
  misc_feature 1..21: note = n-mer motif encoding polynucleotide
  source 1..21: mol_type = other DNA
ggtgtgttggggcagactgat

SEQ ID NO: 5757 - protein, 7 aa, synthetic construct
  REGION 1..7: note = n-mer motif
DIDRLHK

SEQ ID NO: 5758 - DNA, 21 bp, synthetic construct
  misc_feature 1..21: note = n-mer motif encoding polynucleotide
  source 1..21: mol_type = other DNA
gatattgataggctgcataag

SEQ ID NO: 5759 - protein, 7 aa, synthetic construct
  REGION 1..7: note = n-mer motif
HNPGMDK

SEQ ID NO: 5760 - DNA, 21 bp, synthetic construct
  misc_feature 1..21: note = n-mer motif encoding polynucleotide
  source 1..21: mol_type = other DNA
cataatccggggatggataag

SEQ ID NO: 5761 - protein, 7 aa, synthetic construct
  REGION 1..7: note = n-mer motif
TVGLTIA

SEQ ID NO: 5762 - DNA, 21 bp, synthetic construct
  misc_feature 1..21: note = n-mer motif encoding polynucleotide
  source 1..21: mol_type = other DNA
actgtgggtttgacgattgcg

SEQ ID NO: 5763 - protein, 7 aa, synthetic construct
  REGION 1..7: note = n-mer motif
SPPPNAR

SEQ ID NO: 5764 - DNA, 21 bp, synthetic construct
  misc_feature 1..21: note = n-mer motif encoding polynucleotide
  source 1..21: mol_type = other DNA
agcccgccgccgaacgcgcgt

SEQ ID NO: 5765 - protein, 7 aa, synthetic construct
  REGION 1..7: note = n-mer motif
FLLGHTD

SEQ ID NO: 5766 - DNA, 21 bp, synthetic construct
  misc_feature 1..21: note = n-mer motif encoding polynucleotide
  source 1..21: mol_type = other DNA
ttccttctggggcacacggac

SEQ ID NO: 5767 - protein, 7 aa, synthetic construct
  REGION 1..7: note = n-mer motif
VLTSPGP

SEQ ID NO: 5768 - DNA, 21 bp, synthetic construct
  misc_feature 1..21: note = n-mer motif encoding polynucleotide
  source 1..21: mol_type = other DNA
gtgctcacaagcccgggaccg

SEQ ID NO: 5769 - protein, 7 aa, synthetic construct
  REGION 1..7: note = n-mer motif
TAYDTLV

SEQ ID NO: 5770 - DNA, 21 bp, synthetic construct
  misc_feature 1..21: note = n-mer motif encoding polynucleotide
  source 1..21: mol_type = other DNA
acggcgtatgatacgttggtt

SEQ ID NO: 5771 - protein, 7 aa, synthetic construct
  REGION 1..7: note = n-mer motif
SVETGVL

SEQ ID NO: 5772 - DNA, 21 bp, synthetic construct
  misc_feature 1..21: note = n-mer motif encoding polynucleotide
  source 1..21: mol_type = other DNA
tctgtggaaactggcgtctta

SEQ ID NO: 5773 - protein, 7 aa, synthetic construct
  REGION 1..7: note = n-mer motif
TVKEYEL

SEQ ID NO: 5774 - DNA, 21 bp, synthetic construct
  misc_feature 1..21: note = n-mer motif encoding polynucleotide
  source 1..21: mol_type = other DNA
accgttaaagaatacgaactc

SEQ ID NO: 5775 - protein, 7 aa, synthetic construct
  REGION 1..7: note = n-mer motif
MTVPGSP

SEQ ID NO: 5776 - DNA, 21 bp, synthetic construct
  misc_feature 1..21: note = n-mer motif encoding polynucleotide
  source 1..21: mol_type = other DNA
atgacggttccgggtagtccg

SEQ ID NO: 5777 - protein, 7 aa, synthetic construct
  REGION 1..7: note = n-mer motif
YYSITSS

SEQ ID NO: 5778 - DNA, 21 bp, synthetic construct
  misc_feature 1..21: note = n-mer motif encoding polynucleotide
  source 1..21: mol_type = other DNA
tactactccatcacatccagt

SEQ ID NO: 5779 - protein, 7 aa, synthetic construct
  REGION 1..7: note = n-mer motif
STIPTLK

SEQ ID NO: 5780 - DNA, 21 bp, synthetic construct
  misc_feature 1..21: note = n-mer motif encoding polynucleotide
  source 1..21: mol_type = other DNA
agtactattcctactctgaag

SEQ ID NO: 5781 - protein, 7 aa, synthetic construct
  REGION 1..7: note = n-mer motif
MVQSGLT

SEQ ID NO: 5782 - DNA, 21 bp, synthetic construct
  misc_feature 1..21: note = n-mer motif encoding polynucleotide
  source 1..21: mol_type = other DNA
atggttcagtcggggttgacg

SEQ ID NO: 5783 - protein, 7 aa, synthetic construct
  REGION 1..7: note = n-mer motif
MGVGGGS

SEQ ID NO: 5784 - DNA, 21 bp, synthetic construct
  misc_feature 1..21: note = n-mer motif encoding polynucleotide
  source 1..21: mol_type = other DNA
atgggggtcggtggtggatcc

SEQ ID NO: 5785 - protein, 7 aa, synthetic construct
  REGION 1..7: note = n-mer motif
RVDSGQL

SEQ ID NO: 5786 - DNA, 21 bp, synthetic construct
  misc_feature 1..21: note = n-mer motif encoding polynucleotide
  source 1..21: mol_type = other DNA
agggtggattcggggcagctt

SEQ ID NO: 5787 - protein, 7 aa, synthetic construct
  REGION 1..7: note = n-mer motif
REISNLR

SEQ ID NO: 5788 - DNA, 21 bp, synthetic construct
  misc_feature 1..21: note = n-mer motif encoding polynucleotide
  source 1..21: mol_type = other DNA
cgggaaataagcaacctacgt

SEQ ID NO: 5789 - protein, 7 aa, synthetic construct
  REGION 1..7: note = n-mer motif
DHVLLTR

SEQ ID NO: 5790 - DNA, 21 bp, synthetic construct
  misc_feature 1..21: note = n-mer motif encoding polynucleotide
  source 1..21: mol_type = other DNA
gaccacgtgttacttacccgg

SEQ ID NO: 5791 - protein, 7 aa, synthetic construct
  REGION 1..7: note = n-mer motif
TRIGLSD

SEQ ID NO: 5792 - DNA, 21 bp, synthetic construct
  misc_feature 1..21: note = n-mer motif encoding polynucleotide
  source 1..21: mol_type = other DNA
acacgaataggactcagtgac

SEQ ID NO: 5793 - protein, 7 aa, synthetic construct
  REGION 1..7: note = n-mer motif
RVHSAQL

SEQ ID NO: 5794 - DNA, 21 bp, synthetic construct
  misc_feature 1..21: note = n-mer motif encoding polynucleotide
  source 1..21: mol_type = other DNA
agggtgcattcggcgcagctt

SEQ ID NO: 5795 - protein, 7 aa, synthetic construct
  REGION 1..7: note = n-mer motif
YEHSGLL

SEQ ID NO: 5796 - DNA, 21 bp, synthetic construct
  misc_feature 1..21: note = n-mer motif encoding polynucleotide
  source 1..21: mol_type = other DNA
tatgagcattctggtcttttg

SEQ ID NO: 5797 - protein, 7 aa, synthetic construct
  REGION 1..7: note = n-mer motif
VFTGTDT

SEQ ID NO: 5798 - DNA, 21 bp, synthetic construct
  misc_feature 1..21: note = n-mer motif encoding polynucleotide
  source 1..21: mol_type = other DNA
gtgttcacaggaaccgacaca

SEQ ID NO: 5799 - protein, 7 aa, synthetic construct
  REGION 1..7: note = n-mer motif
TLAINER

SEQ ID NO: 5800 - DNA, 21 bp, synthetic construct
  misc_feature 1..21: note = n-mer motif encoding polynucleotide
  source 1..21: mol_type = other DNA
actttggcgattaatgagcgg

SEQ ID NO: 5801 - protein, 7 aa, synthetic construct
  REGION 1..7: note = n-mer motif
LGVTNVA

SEQ ID NO: 5802 - DNA, 21 bp, synthetic construct
  misc_feature 1..21: note = n-mer motif encoding polynucleotide
  source 1..21: mol_type = other DNA
ctaggagtgaccaacgtggcc

SEQ ID NO: 5803 - protein, 7 aa, synthetic construct
  REGION 1..7: note = n-mer motif
GVANVSQ

SEQ ID NO: 5804 - DNA, 21 bp, synthetic construct
  misc_feature 1..21: note = n-mer motif
  source 1..21: mol_type = other DNA
ggtgtggcgaatgtgagtcag

SEQ ID NO: 5805 - protein, 7 aa, synthetic construct
  REGION 1..7: note = n-mer motif
ATVKDSG

SEQ ID NO: 5806 - DNA, 21 bp, synthetic construct
  misc_feature 1..21: note = n-mer motif encoding polynucleotide
  source 1..21: mol_type = other DNA
gcaaccgtaaaagactcgggg

SEQ ID NO: 5807 - protein, 7 aa, synthetic construct
  REGION 1..7: note = n-mer motif
GEIDIAF

SEQ ID NO: 5808 - DNA, 21 bp, synthetic construct
  misc_feature 1..21: note = n-mer motif encoding polynucleotide
  source 1..21: mol_type = other DNA
ggagaaatcgacatagccttc

SEQ ID NO: 5809 - protein, 7 aa, synthetic construct
  REGION 1..7: note = n-mer motif
LSLTDGV

SEQ ID NO: 5810 - DNA, 21 bp, synthetic construct
  misc_feature 1..21: note = n-mer motif encoding polynucleotide
  source 1..21: mol_type = other DNA
ttgtccttaaccgacggagtg

SEQ ID NO: 5811 - protein, 7 aa, synthetic construct
  REGION 1..7: note = n-mer motif
VLLMDRV

SEQ ID NO: 5812 - DNA, 21 bp, synthetic construct
  misc_feature 1..21: note = n-mer motif encoding polynucleotide
  source 1..21: mol_type = other DNA
gtacttcttatggaccgagtt

SEQ ID NO: 5813 - protein, 7 aa, synthetic construct
  REGION 1..7: note = n-mer motif
SSADYQV

SEQ ID NO: 5814 - DNA, 21 bp, synthetic construct
  misc_feature 1..21: note = n-mer motif encoding polynucleotide
  source 1..21: mol_type = other DNA
agttctgcggattatcaggtt

SEQ ID NO: 5815 - protein, 7 aa, synthetic construct
  REGION 1..7: note = n-mer motif
APRDPGV

SEQ ID NO: 5816 - DNA, 21 bp, synthetic construct
  misc_feature 1..21: note = n-mer motif encoding polynucleotide
  source 1..21: mol_type = other DNA
gcgccgcgtgatcctggtgtt

SEQ ID NO: 5817 - protein, 7 aa, synthetic construct
  REGION 1..7: note = n-mer motif
AQAQTGW

SEQ ID NO: 5818 - DNA, 21 bp, synthetic construct
  misc_feature 1..21: note = n-mer motif encoding polynucleotide
  source 1..21: mol_type = other DNA
gctcaagcacagaccggctgg

SEQ ID NO: 5819 - protein, 7 aa, synthetic construct
  REGION 1..7: note = n-mer motif
SNLHTST

SEQ ID NO: 5820 - DNA, 21 bp, synthetic construct
  misc_feature 1..21: note = n-mer motif encoding polynucleotide
  source 1..21: mol_type = other DNA
agtaatcttcatacttcgact

SEQ ID NO: 5821 - protein, 7 aa, synthetic construct
  REGION 1..7: note = n-mer motif
RVDSGLL

SEQ ID NO: 5822 - DNA, 21 bp, synthetic construct
  misc_feature 1..21: note = n-mer motif encoding polynucleotide
  source 1..21: mol_type = other DNA
agggttgatagtgggctgctt

SEQ ID NO: 5823 - protein, 7 aa, synthetic construct
  REGION 1..7: note = n-mer motif
SGGRITD

SEQ ID NO: 5824 - DNA, 21 bp, synthetic construct
  misc_feature 1..21: note = n-mer motif encoding polynucleotide
  source 1..21: mol_type = other DNA
agcggagggcgcatcaccgac

SEQ ID NO: 5825 - protein, 7 aa, synthetic construct
  REGION 1..7: note = n-mer motif
LGIGQGP

SEQ ID NO: 5826 - DNA, 21 bp, synthetic construct
  misc_feature 1..21: note = n-mer motif encoding polynucleotide
  source 1..21: mol_type = other DNA
ttgggtattggtcagggtcct

SEQ ID NO: 5827 - protein, 7 aa, synthetic construct
  REGION 1..7: note = n-mer motif
MGGVTSV

SEQ ID NO: 5828 - DNA, 21 bp, synthetic construct
  misc_feature 1..21: note = n-mer motif encoding polynucleotide
  source 1..21: mol_type = other DNA
atggggggggttacttcggtg

SEQ ID NO: 5829 - protein, 7 aa, synthetic construct
  REGION 1..7: note = n-mer motif
SIYDNVK

SEQ ID NO: 5830 - DNA, 21 bp, synthetic construct
  misc_feature 1..21: note = n-mer motif encoding polynucleotide
  source 1..21: mol_type = other DNA
tcgatatacgacaacgtcaaa

SEQ ID NO: 5831 - protein, 7 aa, synthetic construct
  REGION 1..7: note = n-mer motif
VTSDAGW

SEQ ID NO: 5832 - DNA, 21 bp, synthetic construct
  misc_feature 1..21: note = n-mer motif encoding polynucleotide
  source 1..21: mol_type = other DNA
gtcacctctgacgcagggtgg

SEQ ID NO: 5833 - protein, 7 aa, synthetic construct
  REGION 1..7: note = n-mer motif
AHTEMSH

SEQ ID NO: 5834 - DNA, 21 bp, synthetic construct
  misc_feature 1..21: note = n-mer motif encoding polynucleotide
  source 1..21: mol_type = other DNA
gcccacaccgaaatgtctcac

SEQ ID NO: 5835 - protein, 7 aa, synthetic construct
  REGION 1..7: note = n-mer motif
LLTQDAR

SEQ ID NO: 5836 - DNA, 21 bp, synthetic construct
  misc_feature 1..21: note = n-mer motif encoding polynucleotide
  source 1..21: mol_type = other DNA
ttgcttactcaggatgctcgg

SEQ ID NO: 5837 - protein, 7 aa, synthetic construct
  REGION 1..7: note = n-mer motif
YVGSPLV

SEQ ID NO: 5838 - DNA, 21 bp, synthetic construct
  misc_feature 1..21: note = n-mer motif encoding polynucleotide
  source 1..21: mol_type = other DNA
tatgttggttctccgttggtg

SEQ ID NO: 5839 - protein, 7 aa, synthetic construct
  REGION 1..7: note = n-mer motif
ENAGTDV

SEQ ID NO: 5840 - DNA, 21 bp, synthetic construct
  misc_feature 1..21: note = n-mer motif encoding polynucleotide
  source 1..21: mol_type = other DNA
gaaaacgccggaactgacgtc

SEQ ID NO: 5841 - protein, 7 aa, synthetic construct
  REGION 1..7: note = n-mer motif
SIYDNDT

SEQ ID NO: 5842 - DNA, 21 bp, synthetic construct
  misc_feature 1..21: note = n-mer motif encoding polynucleotide
  source 1..21: mol_type = other DNA
tccatctacgacaacgacacc

SEQ ID NO: 5843 - protein, 7 aa, synthetic construct
  REGION 1..7: note = n-mer motif
AATSGGP

SEQ ID NO: 5844 - DNA, 21 bp, synthetic construct
  misc_feature 1..21: note = n-mer motif encoding polynucleotide
  source 1..21: mol_type = other DNA
gcagccaccagtggcgggccg

SEQ ID NO: 5845 - protein, 7 aa, synthetic construct
  REGION 1..7: note = n-mer motif
STIPTLM

SEQ ID NO: 5846 - DNA, 21 bp, synthetic construct
  misc_feature 1..21: note = n-mer motif encoding polynucleotide
  source 1..21: mol_type = other DNA
tcgacgataccaaccttgatg

SEQ ID NO: 5847 - protein, 7 aa, synthetic construct
  REGION 1..7: note = n-mer motif
SGMQAEA

SEQ ID NO: 5848 - DNA, 21 bp, synthetic construct
  misc_feature 1..21: note = n-mer motif encoding polynucleotide
  source 1..21: mol_type = other DNA
tcgggtatgcaggcggaggct

SEQ ID NO: 5849 - protein, 7 aa, synthetic construct
  REGION 1..7: note = n-mer motif
GNGDMFA

SEQ ID NO: 5850 - DNA, 21 bp, synthetic construct
  misc_feature 1..21: note = n-mer motif encoding polynucleotide
  source 1..21: mol_type = other DNA
gggaatggggatatgtttgct

SEQ ID NO: 5851 - protein, 7 aa, synthetic construct
  REGION 1..7: note = n-mer motif
LNGGIGV

SEQ ID NO: 5852 - DNA, 21 bp, synthetic construct
  misc_feature 1..21: note = n-mer motif encoding polynucleotide
  source 1..21: mol_type = other DNA
cttaatgggggtattggggtt

SEQ ID NO: 5853 - protein, 7 aa, synthetic construct
  REGION 1..7: note = n-mer motif
TAVERAW

SEQ ID NO: 5854 - DNA, 21 bp, synthetic construct
  misc_feature 1..21: note = n-mer motif encoding polynucleotide
  source 1..21: mol_type = other DNA
acggctgttgagcgggcgtgg

SEQ ID NO: 5855 - protein, 7 aa, synthetic construct
  REGION 1..7: note = n-mer motif
NNGIVIA

SEQ ID NO: 5856 - DNA, 21 bp, synthetic construct
  misc_feature 1..21: note = n-mer motif encoding polynucleotide
  source 1..21: mol_type = other DNA
aataatgggattgtgattgcg

SEQ ID NO: 5857 - protein, 7 aa, synthetic construct
  REGION 1..7: note = n-mer motif
GPDTGAM

SEQ ID NO: 5858 - DNA, 21 bp, synthetic construct
  misc_feature 1..21: note = n-mer motif encoding polynucleotide
  source 1..21: mol_type = other DNA
ggccccgacacaggcgcgatg

SEQ ID NO: 5859 - protein, 7 aa, synthetic construct
  REGION 1..7: note = n-mer motif
PSRGIPL

SEQ ID NO: 5860 - DNA, 21 bp, synthetic construct
  misc_feature 1..21: note = n-mer motif encoding polynucleotide
  source 1..21: mol_type = other DNA
ccgagtcgtggtattcctctt

SEQ ID NO: 5861 - protein, 7 aa, synthetic construct
  REGION 1..7: note = n-mer motif
VGGAGEI

SEQ ID NO: 5862 - DNA, 21 bp, synthetic construct
  misc_feature 1..21: note = n-mer motif encoding polynucleotide
  source 1..21: mol_type = other DNA
gttggtggggcgggtgagatt

SEQ ID NO: 5863 - protein, 7 aa, synthetic construct
  REGION 1..7: note = n-mer motif
VLQLAAL

SEQ ID NO: 5864 - DNA, 21 bp, synthetic construct
  misc_feature 1..21: note = n-mer motif encoding polynucleotide
  source 1..21: mol_type = other DNA
gttcttcaactcgctgccctc

SEQ ID NO: 5865 - protein, 7 aa, synthetic construct
  REGION 1..7: note = n-mer motif
LSDGGPL

SEQ ID NO: 5866 - DNA, 21 bp, synthetic construct
  misc_feature 1..21: note = n-mer motif encoding polynucleotide
  source 1..21: mol_type = other DNA
ctctcggacggaggccccctc

SEQ ID NO: 5867 - protein, 7 aa, synthetic construct
  REGION 1..7: note = n-mer motif
VSGGVLD

SEQ ID NO: 5868 - DNA, 21 bp, synthetic construct
  misc_feature 1..21: note = n-mer motif encoding polynucleotide
  source 1..21: mol_type = other DNA
gtatccggcggagtactagac

SEQ ID NO: 5869 - protein, 7 aa, synthetic construct
  REGION 1..7: note = n-mer motif
MSITEPR

SEQ ID NO: 5870 - DNA, 21 bp, synthetic construct
  misc_feature 1..21: note = n-mer motif encoding polynucleotide
  source 1..21: mol_type = other DNA
atgtctattactgagccgcgg

SEQ ID NO: 5871 - protein, 7 aa, synthetic construct
  REGION 1..7: note = n-mer motif
SGSNTGP

SEQ ID NO: 5872 - DNA, 21 bp, synthetic construct
  misc_feature 1..21: note = n-mer motif encoding polynucleotide
  source 1..21: mol_type = other DNA
agcggctccaacactggcccg

SEQ ID NO: 5873 - protein, 7 aa, synthetic construct
  REGION 1..7: note = n-mer motif
SLRDTHY

SEQ ID NO: 5874 - DNA, 21 bp, synthetic construct
  misc_feature 1..21: note = n-mer motif encoding polynucleotide
  source 1..21: mol_type = other DNA
agtcttcgggatactcattat

SEQ ID NO: 5875 - protein, 7 aa, synthetic construct
  REGION 1..7: note = n-mer motif
MGDAGLR

SEQ ID NO: 5876 - DNA, 21 bp, synthetic construct
  misc_feature 1..21: note = n-mer motif encoding polynucleotide
  source 1..21: mol_type = other DNA
atgggggatgcggggctgcgg

SEQ ID NO: 5877 - protein, 7 aa, synthetic construct
  REGION 1..7: note = n-mer motif
IVMSSHI

SEQ ID NO: 5878 - DNA, 21 bp, synthetic construct
  misc_feature 1..21: note = n-mer motif encoding polynucleotide
  source 1..21: mol_type = other DNA
atcgtcatgagctcccacatc

SEQ ID NO: 5879 - protein, 7 aa, synthetic construct
  REGION 1..7: note = n-mer motif
ASPLPQT

SEQ ID NO: 5880 - DNA, 21 bp, synthetic construct
  misc_feature 1..21: note = n-mer motif encoding polynucleotide
  source 1..21: mol_type = other DNA
gctagtcccttgccccaaacc

SEQ ID NO: 5881 - protein, 7 aa, synthetic construct
  REGION 1..7: note = n-mer motif
SEISILR

SEQ ID NO: 5882 - DNA, 21 bp, synthetic construct
  misc_feature 1..21: note = n-mer motif encoding polynucleotide
  source 1..21: mol_type = other DNA
agtgagattagtattctgcgg

SEQ ID NO: 5883 - protein, 7 aa, synthetic construct
  REGION 1..7: note = n-mer motif
SEGLSRD

SEQ ID NO: 5884 - DNA, 21 bp, synthetic construct
  misc_feature 1..21: note = n-mer motif encoding polynucleotide
  source 1..21: mol_type = other DNA
tcggagggtctttcgcgtgat

SEQ ID NO: 5885 - protein, 7 aa, synthetic construct
  REGION 1..7: note = n-mer motif
LGSLVVH

SEQ ID NO: 5886 - DNA, 21 bp, synthetic construct
  misc_feature 1..21: note = n-mer motif encoding polynucleotide
  source 1..21: mol_type = other DNA
ctgggaagcttagtcgttcac

SEQ ID NO: 5887 - protein, 7 aa, synthetic construct
  REGION 1..7: note = n-mer motif
ETRLDSK

SEQ ID NO: 5888 - DNA, 21 bp, synthetic construct
  misc_feature 1..21: note = n-mer motif encoding polynucleotide
  source 1..21: mol_type = other DNA
gaaacccgactcgactcgaaa

SEQ ID NO: 5889 - protein, 7 aa, synthetic construct
  REGION 1..7: note = n-mer motif
ANQLAPV

SEQ ID NO: 5890 - DNA, 21 bp, synthetic construct
  misc_feature 1..21: note = n-mer motif encoding polynucleotide
  source 1..21: mol_type = other DNA
gccaaccaattggcccccgtg

SEQ ID NO: 5891 - protein, 7 aa, synthetic construct
  REGION 1..7: note = n-mer motif
LFGPSAY

SEQ ID NO: 5892 - DNA, 21 bp, synthetic construct
  misc_feature 1..21: note = n-mer motif encoding polynucleotide
  source 1..21: mol_type = other DNA
ttattcggaccttccgcctac

SEQ ID NO: 5893 - protein, 7 aa, synthetic construct
  REGION 1..7: note = n-mer motif
SMTSESS

SEQ ID NO: 5894 - DNA, 21 bp, synthetic construct
  misc_feature 1..21: note = n-mer motif encoding polynucleotide
  source 1..21: mol_type = other DNA
tcaatgacttcggaatcgtct

SEQ ID NO: 5895 - protein, 7 aa, synthetic construct
  REGION 1..7: note = n-mer motif
MTDSGTV

SEQ ID NO: 5896 - DNA, 21 bp, synthetic construct
  misc_feature 1..21: note = n-mer motif encoding polynucleotide
  source 1..21: mol_type = other DNA
atgactgatagtgggactgtg

SEQ ID NO: 5897 - protein, 7 aa, synthetic construct
  REGION 1..7: note = n-mer motif
FQVEQIM

SEQ ID NO: 5898 - DNA, 21 bp, synthetic construct
  misc_feature 1..21: note = n-mer motif encoding polynucleotide
  source 1..21: mol_type = other DNA
tttcaggttgagcagattatg

SEQ ID NO: 5899 - protein, 7 aa, synthetic construct
  REGION 1..7: note = n-mer motif
RVDSEQL

SEQ ID NO: 5900 - DNA, 21 bp, synthetic construct
  misc_feature 1..21: note = n-mer motif encoding polynucleotide
  source 1..21: mol_type = other DNA
agggtggattcggagcagctt

SEQ ID NO: 5901 - protein, 7 aa, synthetic construct
  REGION 1..7: note = n-mer motif
SNTGVTV

SEQ ID NO: 5902 - DNA, 21 bp, synthetic construct
  misc_feature 1..21: note = n-mer motif encoding polynucleotide
  source 1..21: mol_type = other DNA
tcgaatactggtgttacggtg

SEQ ID NO: 5903 - protein, 7 aa, synthetic construct
  REGION 1..7: note = n-mer motif
ITQAVYI

SEQ ID NO: 5904 - DNA, 21 bp, synthetic construct
  misc_feature 1..21: note = n-mer motif encoding polynucleotide
  source 1..21: mol_type = other DNA
atcacacaagcggtatacatc

SEQ ID NO: 5905 - protein, 7 aa, synthetic construct
  REGION 1..7: note = n-mer motif
GALSSTK

SEQ ID NO: 5906 - DNA, 21 bp, synthetic construct
  misc_feature 1..21: note = n-mer motif encoding polynucleotide
  source 1..21: mol_type = other DNA
ggtgctctttcttcgactaag

SEQ ID NO: 5907 - protein, 7 aa, synthetic construct
  REGION 1..7: note = n-mer motif
IMVDAHS

SEQ ID NO: 5908 - DNA, 21 bp, synthetic construct
  misc_feature 1..21: note = n-mer motif encoding polynucleotide
  source 1..21: mol_type = other DNA
attatggttgatgctcattcg

SEQ ID NO: 5909 - protein, 7 aa, synthetic construct
  REGION 1..7: note = n-mer motif
GSGVQPV

SEQ ID NO: 5910 - DNA, 21 bp, synthetic construct
  misc_feature 1..21: note = n-mer motif encoding polynucleotide
  source 1..21: mol_type = other DNA
gggtccggcgtacaaccggta

SEQ ID NO: 5911 - protein, 7 aa, synthetic construct
  REGION 1..7: note = n-mer motif
GSGPGVA

SEQ ID NO: 5912 - DNA, 21 bp, synthetic construct
  misc_feature 1..21: note = n-mer motif encoding polynucleotide
  source 1..21: mol_type = other DNA
ggttctgggccgggggtggct

SEQ ID NO: 5913 - protein, 7 aa, synthetic construct
  REGION 1..7: note = n-mer motif
KHSSEMT

SEQ ID NO: 5914 - DNA, 21 bp, synthetic construct
  misc_feature 1..21: note = n-mer motif encoding polynucleotide
  source 1..21: mol_type = other DNA
aaacacagctcagaaatgacc

SEQ ID NO: 5915 - protein, 7 aa, synthetic construct
  REGION 1..7: note = n-mer motif
TRTEDYT

SEQ ID NO: 5916 - DNA, 21 bp, synthetic construct
  misc_feature 1..21: note = n-mer motif encoding polynucleotide
  source 1..21: mol_type = other DNA
acgcgtacggaggattatact

SEQ ID NO: 5917 - protein, 7 aa, synthetic construct
  REGION 1..7: note = n-mer motif
ILNPTAV

SEQ ID NO: 5918 - DNA, 21 bp, synthetic construct
  misc_feature 1..21: note = n-mer motif encoding polynucleotide
  source 1..21: mol_type = other DNA
attcttaatccgacggcggtg

SEQ ID NO: 5919 - protein, 7 aa, synthetic construct
  REGION 1..7: note = n-mer motif
IGSSLSP

SEQ ID NO: 5920 - DNA, 21 bp, synthetic construct
  misc_feature 1..21: note = n-mer motif encoding polynucleotide
  source 1..21: mol_type = other DNA
attgggtcgtcgcttagtcct

SEQ ID NO: 5921 - protein, 7 aa, synthetic construct
  REGION 1..7: note = n-mer motif
SGFVVPV

SEQ ID NO: 5922 - DNA, 21 bp, synthetic construct
  misc_feature 1..21: note = n-mer motif encoding polynucleotide
  source 1..21: mol_type = other DNA
tctgggtttgttgtgccggtg

SEQ ID NO: 5923 - protein, 7 aa, synthetic construct
  REGION 1..7: note = n-mer motif
RTTPDVT

SEQ ID NO: 5924 - DNA, 21 bp, synthetic construct
  misc_feature 1..21: note = n-mer motif encoding polynucleotide
  source 1..21: mol_type = other DNA
cgcacgacccccgacgtaaca

SEQ ID NO: 5925 - protein, 7 aa, synthetic construct
  REGION 1..7: note = n-mer motif
APTATLR

SEQ ID NO: 5926 - DNA, 21 bp, synthetic construct
  misc_feature 1..21: note = n-mer motif encoding polynucleotide
  source 1..21: mol_type = other DNA
gcgcctactgctactcttcgg

SEQ ID NO: 5927 - protein, 7 aa, synthetic construct
  REGION 1..7: note = n-mer motif
YDRIMSS

SEQ ID NO: 5928 - DNA, 21 bp, synthetic construct
  misc_feature 1..21: note = n-mer motif encoding polynucleotide
  source 1..21: mol_type = other DNA
tacgaccgcataatgtcatct

SEQ ID NO: 5929 - protein, 7 aa, synthetic construct
  REGION 1..7: note = n-mer motif
YGSNDLS

SEQ ID NO: 5930 - DNA, 21 bp, synthetic construct
  misc_feature 1..21: note = n-mer motif encoding polynucleotide
  source 1..21: mol_type = other DNA
tatgggagtaatgatctgagt

SEQ ID NO: 5931 - protein, 7 aa, synthetic construct
  REGION 1..7: note = n-mer motif
GDRGVVA

SEQ ID NO: 5932 - DNA, 21 bp, synthetic construct
  misc_feature 1..21: note = n-mer motif encoding polynucleotide
  source 1..21: mol_type = other DNA
ggtgataggggggttgtggct

SEQ ID NO: 5933 - protein, 7 aa, synthetic construct
  REGION 1..7: note = n-mer motif
QAALSDR

SEQ ID NO: 5934 - DNA, 21 bp, synthetic construct
  misc_feature 1..21: note = n-mer motif encoding polynucleotide
  source 1..21: mol_type = other DNA
caagcggcactatcagaccgg

SEQ ID NO: 5935 - protein, 7 aa, synthetic construct
  REGION 1..7: note = n-mer motif
AADSSGR

SEQ ID NO: 5936 - DNA, 21 bp, synthetic construct
  misc_feature 1..21: note = n-mer motif encoding polynucleotide
  source 1..21: mol_type = other DNA
gcggcggatagttctgggcgg

SEQ ID NO: 5937 - protein, 7 aa, synthetic construct
  REGION 1..7: note = n-mer motif
PTLGTLR

SEQ ID NO: 5938 - DNA, 21 bp, synthetic construct
  misc_feature 1..21: note = n-mer motif encoding polynucleotide
  source 1..21: mol_type = other DNA
cctactctggggacgcttcgg

SEQ ID NO: 5939 - protein, 7 aa, synthetic construct
  REGION 1..7: note = n-mer motif
PNLGNPS

SEQ ID NO: 5940 - DNA, 21 bp, synthetic construct
  misc_feature 1..21: note = n-mer motif encoding polynucleotide
  source 1..21: mol_type = other DNA
cccaacctcggaaacccatct

SEQ ID NO: 5941 - protein, 7 aa, synthetic construct
  REGION 1..7: note = n-mer motif
PTQGTNR

SEQ ID NO: 5942 - DNA, 21 bp, synthetic construct
  misc_feature 1..21: note = n-mer motif encoding polynucleotide
  source 1..21: mol_type = other DNA
ccaacacaaggtacaaacagg

SEQ ID NO: 5943 - protein, 7 aa, synthetic construct
  REGION 1..7: note = n-mer motif
SRGVISS

SEQ ID NO: 5944 - DNA, 21 bp, synthetic construct
  misc_feature 1..21: note = n-mer motif encoding polynucleotide
  source 1..21: mol_type = other DNA
agccgaggcgtaatctcgtca

SEQ ID NO: 5945 - protein, 7 aa, synthetic construct
  REGION 1..7: note = n-mer motif
ASVSSLR

SEQ ID NO: 5946 - DNA, 21 bp, synthetic construct
  misc_feature 1..21: note = n-mer motif encoding polynucleotide
  source 1..21: mol_type = other DNA
gctagtgtgtcttcgctgcgt

SEQ ID NO: 5947 - protein, 7 aa, synthetic construct
  REGION 1..7: note = n-mer motif
LRVTEDL

SEQ ID NO: 5948 - DNA, 21 bp, synthetic construct
  misc_feature 1..21: note = n-mer motif encoding polynucleotide
  source 1..21: mol_type = other DNA
ttgcgtgtgacggaggatctg

SEQ ID NO: 5949 - protein, 7 aa, synthetic construct
  REGION 1..7: note = n-mer motif
MTGLDDV

SEQ ID NO: 5950 - DNA, 21 bp, synthetic construct
  misc_feature 1..21: note = n-mer motif encoding polynucleotide
  source 1..21: mol_type = other DNA
atgacgggcctagacgacgta

SEQ ID NO: 5951 - protein, 7 aa, synthetic construct
  REGION 1..7: note = n-mer motif
TSLGPMV

SEQ ID NO: 5952 - DNA, 21 bp, synthetic construct
  misc_feature 1..21: note = n-mer motif encoding polynucleotide
  source 1..21: mol_type = other DNA
acttcgttaggcccgatggtc

SEQ ID NO: 5953 - protein, 7 aa, synthetic construct
  REGION 1..7: note = n-mer motif
MAGGVQV

SEQ ID NO: 5954 - DNA, 21 bp, synthetic construct
  misc_feature 1..21: note = n-mer motif encoding polynucleotide
  source 1..21: mol_type = other DNA
atggcgggtggggtgcaggtt

SEQ ID NO: 5955 - protein, 7 aa, synthetic construct
  REGION 1..7: note = n-mer motif
NGASLAS

SEQ ID NO: 5956 - DNA, 21 bp, synthetic construct
  misc_feature 1..21: note = n-mer motif encoding polynucleotide
  source 1..21: mol_type = other DNA
aacggagcttccctcgcaagc

SEQ ID NO: 5957 - protein, 7 aa, synthetic construct
  REGION 1..7: note = n-mer motif
TNGVLYT

SEQ ID NO: 5958 - DNA, 21 bp, synthetic construct
  misc_feature 1..21: note = n-mer motif encoding polynucleotide
  source 1..21: mol_type = other DNA
acaaacggcgtcctttacacg

SEQ ID NO: 5959 - protein, 7 aa, synthetic construct
  REGION 1..7: note = n-mer motif
MNGGHVQ

SEQ ID NO: 5960 - DNA, 21 bp, synthetic construct
  misc_feature 1..21: note = n-mer motif encoding polynucleotide
  source 1..21: mol_type = other DNA
atgaacggagggcacgtgcaa

SEQ ID NO: 5961 - protein, 7 aa, synthetic construct
  REGION 1..7: note = n-mer motif
VMASTGP

SEQ ID NO: 5962 - DNA, 21 bp, synthetic construct
  misc_feature 1..21: note = n-mer motif encoding polynucleotide
  source 1..21: mol_type = other DNA
gtaatggcgtcaacaggaccg

SEQ ID NO: 5963 - protein, 7 aa, synthetic construct
  REGION 1..7: note = n-mer motif
VLASLGD

SEQ ID NO: 5964 - DNA, 21 bp, synthetic construct
  misc_feature 1..21: note = n-mer motif encoding polynucleotide
  source 1..21: mol_type = other DNA
gtactcgcgtcgttgggcgac

SEQ ID NO: 5965 - protein, 7 aa, synthetic construct
  REGION 1..7: note = n-mer motif
ILVDALA

SEQ ID NO: 5966 - DNA, 21 bp, synthetic construct
  misc_feature 1..21: note = n-mer motif encoding polynucleotide
  source 1..21: mol_type = other DNA
attctggttgatgctcttgcg

SEQ ID NO: 5967 - protein, 7 aa, synthetic construct
  REGION 1..7: note = n-mer motif
SADSSVR

SEQ ID NO: 5968 - DNA, 21 bp, synthetic construct
  misc_feature 1..21: note = n-mer motif encoding polynucleotide
  source 1..21: mol_type = other DNA
tcggcggatagttctgtgcgg

SEQ ID NO: 5969 - protein, 7 aa, synthetic construct
  REGION 1..7: note = n-mer motif
NRELALG

SEQ ID NO: 5970 - DNA, 21 bp, synthetic construct
  misc_feature 1..21: note = n-mer motif encoding polynucleotide
  source 1..21: mol_type = other DNA
aaccgcgaactcgcactcggg

SEQ ID NO: 5971 - protein, 7 aa, synthetic construct
  REGION 1..7: note = n-mer motif
SHASDSK

SEQ ID NO: 5972 - DNA, 21 bp, synthetic construct
  misc_feature 1..21: note = n-mer motif encoding polynucleotide
  source 1..21: mol_type = other DNA
tcgcacgcatcagactctaaa

SEQ ID NO: 5973 - protein, 7 aa, synthetic construct
  REGION 1..7: note = n-mer motif
AGHSNAV

SEQ ID NO: 5974 - DNA, 21 bp, synthetic construct
  misc_feature 1..21: note = n-mer motif encoding polynucleotide
  source 1..21: mol_type = other DNA
gctgggcattctaatgcggtt

SEQ ID NO: 5975 - protein, 7 aa, synthetic construct
  REGION 1..7: note = n-mer motif
MVTPTNS

SEQ ID NO: 5976 - DNA, 21 bp, synthetic construct
  misc_feature 1..21: note = n-mer motif encoding polynucleotide
  source 1..21: mol_type = other DNA
atggtgacgccgaccaacagt

SEQ ID NO: 5977 - protein, 7 aa, synthetic construct
  REGION 1..7: note = n-mer motif
TIDRFGS

SEQ ID NO: 5978 - DNA, 21 bp, synthetic construct
  misc_feature 1..21: note = n-mer motif encoding polynucleotide
  source 1..21: mol_type = other DNA
acaatagaccgattcggaagt

SEQ ID NO: 5979 - protein, 7 aa, synthetic construct
  REGION 1..7: note = n-mer motif
RGAEVLL

SEQ ID NO: 5980 - DNA, 21 bp, synthetic construct
  misc_feature 1..21: note = n-mer motif encoding polynucleotide
  source 1..21: mol_type = other DNA
cggggtgcggaggtgctgctg

SEQ ID NO: 5981 - protein, 7 aa, synthetic construct
  REGION 1..7: note = n-mer motif
TFAISDR

SEQ ID NO: 5982 - DNA, 21 bp, synthetic construct
  misc_feature 1..21: note = n-mer motif encoding polynucleotide
  source 1..21: mol_type = other DNA
acttttgcgatttctgatcgg

SEQ ID NO: 5983 - protein, 7 aa, synthetic construct
  REGION 1..7: note = n-mer motif
SQGSDSK

SEQ ID NO: 5984 - DNA, 21 bp, synthetic construct
  misc_feature 1..21: note = n-mer motif encoding polynucleotide
  source 1..21: mol_type = other DNA
agtcaaggctccgactcaaaa

SEQ ID NO: 5985 - protein, 7 aa, synthetic construct
  REGION 1..7: note = n-mer motif
ASGVRPV

SEQ ID NO: 5986 - DNA, 21 bp, synthetic construct
  misc_feature 1..21: note = n-mer motif encoding polynucleotide
  source 1..21: mol_type = other DNA
gcgtcaggtgttagaccggta

SEQ ID NO: 5987 - protein, 7 aa, synthetic construct
  REGION 1..7: note = n-mer motif
SDATGVL

SEQ ID NO: 5988 - DNA, 21 bp, synthetic construct
  misc_feature 1..21: note = n-mer motif encoding polynucleotide
  source 1..21: mol_type = other DNA
tccgacgctaccggtgtgcta

SEQ ID NO: 5989 - protein, 7 aa, synthetic construct
  REGION 1..7: note = n-mer motif
LTLSNGV

SEQ ID NO: 5990 - DNA, 21 bp, synthetic construct
  misc_feature 1..21: note = n-mer motif encoding polynucleotide
  source 1..21: mol_type = other DNA
cttacgctgagtaatggggtg

SEQ ID NO: 5991 - protein, 7 aa, synthetic construct
  REGION 1..7: note = n-mer motif
DSDSGRR

SEQ ID NO: 5992 - DNA, 21 bp, synthetic construct
  misc_feature 1..21: note = n-mer motif encoding polynucleotide
  source 1..21: mol_type = other DNA
gattctgatagtgggcggcgg

SEQ ID NO: 5993 - protein, 7 aa, synthetic construct
  REGION 1..7: note = n-mer motif
LYTSDRV

SEQ ID NO: 5994 - DNA, 21 bp, synthetic construct
  misc_feature 1..21: note = n-mer motif encoding polynucleotide
  source 1..21: mol_type = other DNA
ctatacacatctgaccgagtg

SEQ ID NO: 5995 - protein, 7 aa, synthetic construct
  REGION 1..7: note = n-mer motif
QDAHVAI

SEQ ID NO: 5996 - DNA, 21 bp, synthetic construct
  misc_feature 1..21: note = n-mer motif encoding polynucleotide
  source 1..21: mol_type = other DNA
caggatgcgcatgtggctatt

SEQ ID NO: 5997 - protein, 7 aa, synthetic construct
  REGION 1..7: note = n-mer motif
IVDSGLL

SEQ ID NO: 5998 - DNA, 21 bp, synthetic construct
  misc_feature 1..21: note = n-mer motif encoding polynucleotide
  source 1..21: mol_type = other DNA
attgttgatagtgggctgctt

SEQ ID NO: 5999 - protein, 7 aa, synthetic construct
  REGION 1..7: note = n-mer motif
LYGGSSA

SEQ ID NO: 6000 - DNA, 21 bp, synthetic construct
  misc_feature 1..21: note = n-mer motif encoding polynucleotide
  source 1..21: mol_type = other DNA
ctctacggagggtcctcggct

SEQ ID NO: 6001 - protein, 7 aa, synthetic construct
  REGION 1..7: note = n-mer motif
NFGRDTL

SEQ ID NO: 6002 - DNA, 21 bp, synthetic construct
  misc_feature 1..21: note = n-mer motif
  source 1..21: mol_type = other DNA
aattttggtcgtgatactctg

SEQ ID NO: 6003 - protein, 7 aa, synthetic construct
  REGION 1..7: note = n-mer motif
TPVYTVK

SEQ ID NO: 6004 - DNA, 21 bp, synthetic construct
  misc_feature 1..21: note = n-mer motif encoding polynucleotide
  source 1..21: mol_type = other DNA
acccccgtctacaccgtaaaa

SEQ ID NO: 6005 - protein, 7 aa, synthetic construct
  REGION 1..7: note = n-mer motif
AAVVPRY

SEQ ID NO: 6006 - DNA, 21 bp, synthetic construct
  misc_feature 1..21: note = n-mer motif encoding polynucleotide
  source 1..21: mol_type = other DNA
gcagcagtagtaccacgatac

SEQ ID NO: 6007 - protein, 7 aa, synthetic construct
  REGION 1..7: note = n-mer motif
SNVALTG

SEQ ID NO: 6008 - DNA, 21 bp, synthetic construct
  misc_feature 1..21: note = n-mer motif encoding polynucleotide
  source 1..21: mol_type = other DNA
agcaacgttgcactgaccggc

SEQ ID NO: 6009 - protein, 7 aa, synthetic construct
  REGION 1..7: note = n-mer motif
ASMGTVA

SEQ ID NO: 6010 - DNA, 21 bp, synthetic construct
  misc_feature 1..21: note = n-mer motif encoding polynucleotide
  source 1..21: mol_type = other DNA
gcgtccatgggaaccgtagcc

SEQ ID NO: 6011 - protein, 7 aa, synthetic construct
  REGION 1..7: note = n-mer motif
TIGVVAN

SEQ ID NO: 6012 - DNA, 21 bp, synthetic construct
  misc_feature 1..21: note = n-mer motif encoding polynucleotide
  source 1..21: mol_type = other DNA
acgattggggttgtggcgaat

SEQ ID NO: 6013 - protein, 7 aa, synthetic construct
  REGION 1..7: note = n-mer motif
TSVLPQT

SEQ ID NO: 6014 - DNA, 21 bp, synthetic construct
  misc_feature 1..21: note = n-mer motif encoding polynucleotide
  source 1..21: mol_type = other DNA
acgtctgtgcttcctcagact

SEQ ID NO: 6015 - protein, 7 aa, synthetic construct
  REGION 1..7: note = n-mer motif
LHAGESR

SEQ ID NO: 6016 - DNA, 21 bp, synthetic construct
  misc_feature 1..21: note = n-mer motif encoding polynucleotide
  source 1..21: mol_type = other DNA
cttcatgctggtgagtctagg

SEQ ID NO: 6017 - protein, 7 aa, synthetic construct
  REGION 1..7: note = n-mer motif
STTSSPR

SEQ ID NO: 6018 - DNA, 21 bp, synthetic construct
  misc_feature 1..21: note = n-mer motif encoding polynucleotide
  source 1..21: mol_type = other DNA
tctacgacgagttcgccgcgt

SEQ ID NO: 6019 - protein, 7 aa, synthetic construct
  REGION 1..7: note = n-mer motif
PGHGPVR

SEQ ID NO: 6020 - DNA, 21 bp, synthetic construct
  misc_feature 1..21: note = n-mer motif encoding polynucleotide
  source 1..21: mol_type = other DNA
cccgggcacggacctgtacgc

SEQ ID NO: 6021 - protein, 7 aa, synthetic construct
  REGION 1..7: note = n-mer motif
FTSGTGN

SEQ ID NO: 6022 - DNA, 21 bp, synthetic construct
  misc_feature 1..21: note = n-mer motif encoding polynucleotide
  source 1..21: mol_type = other DNA
ttcacaagcgggaccggaaac

SEQ ID NO: 6023 - protein, 7 aa, synthetic construct
  REGION 1..7: note = n-mer motif
QILGASS

SEQ ID NO: 6024 - DNA, 21 bp, synthetic construct
  misc_feature 1..21: note = n-mer motif encoding polynucleotide
  source 1..21: mol_type = other DNA
caaatcttaggggcctcgagt

SEQ ID NO: 6025 - protein, 7 aa, synthetic construct
  REGION 1..7: note = n-mer motif
EVRDTKT

SEQ ID NO: 6026 - DNA, 21 bp, synthetic construct
  misc_feature 1..21: note = n-mer motif encoding polynucleotide
  source 1..21: mol_type = other DNA
gaagttcgggacacaaaaacg

SEQ ID NO: 6027 - protein, 7 aa, synthetic construct
  REGION 1..7: note = n-mer motif
VLPSPGP

SEQ ID NO: 6028 - DNA, 21 bp, synthetic construct
  misc_feature 1..21: note = n-mer motif encoding polynucleotide
  source 1..21: mol_type = other DNA
gttctgccttcgcctggtcct

SEQ ID NO: 6029 - protein, 7 aa, synthetic construct
  REGION 1..7: note = n-mer motif
INNFAPP

SEQ ID NO: 6030 - DNA, 21 bp, synthetic construct
  misc_feature 1..21: note = n-mer motif encoding polynucleotide
  source 1..21: mol_type = other DNA
ataaacaacttcgcaccgccc

SEQ ID NO: 6031 - protein, 7 aa, synthetic construct
  REGION 1..7: note = n-mer motif
ELRPQSS

SEQ ID NO: 6032 - DNA, 21 bp, synthetic construct
  misc_feature 1..21: note = n-mer motif encoding polynucleotide
  source 1..21: mol_type = other DNA
gaactccggccccaatcatct

SEQ ID NO: 6033 - protein, 7 aa, synthetic construct
  REGION 1..7: note = n-mer motif
LTDKMTS

SEQ ID NO: 6034 - DNA, 21 bp, synthetic construct
  misc_feature 1..21: note = n-mer motif encoding polynucleotide
  source 1..21: mol_type = other DNA
ttgactgataagatgacgtcg

SEQ ID NO: 6035 - protein, 7 aa, synthetic construct
  REGION 1..7: note = n-mer motif
IYPQSST

SEQ ID NO: 6036 - DNA, 21 bp, synthetic construct
  misc_feature 1..21: note = n-mer motif encoding polynucleotide
  source 1..21: mol_type = other DNA
atatacccacaaagctccacc

SEQ ID NO: 6037 - protein, 7 aa, synthetic construct
  REGION 1..7: note = n-mer motif
VVSGLLH

SEQ ID NO: 6038 - DNA, 21 bp, synthetic construct
  misc_feature 1..21: note = n-mer motif encoding polynucleotide
  source 1..21: mol_type = other DNA
gttgtctccgggttgctacac

SEQ ID NO: 6039 - protein, 7 aa, synthetic construct
  REGION 1..7: note = n-mer motif
ATVAGQY

SEQ ID NO: 6040 - DNA, 21 bp, synthetic construct
  misc_feature 1..21: note = n-mer motif encoding polynucleotide
  source 1..21: mol_type = other DNA
gctaccgtggcaggccaatac

SEQ ID NO: 6041 - protein, 7 aa, synthetic construct
  REGION 1..7: note = n-mer motif
NLGGVQL

SEQ ID NO: 6042 - DNA, 21 bp, synthetic construct
  misc_feature 1..21: note = n-mer motif encoding polynucleotide
  source 1..21: mol_type = other DNA
aacttaggaggcgtccaattg

SEQ ID NO: 6043 - protein, 7 aa, synthetic construct
  REGION 1..7: note = n-mer motif
SEPSGTL

SEQ ID NO: 6044 - DNA, 21 bp, synthetic construct
  misc_feature 1..21: note = n-mer motif encoding polynucleotide
  source 1..21: mol_type = other DNA
agcgaaccctccggaacttta

SEQ ID NO: 6045 - protein, 7 aa, synthetic construct
  REGION 1..7: note = n-mer motif
MNGGHVI

SEQ ID NO: 6046 - DNA, 21 bp, synthetic construct
  misc_feature 1..21: note = n-mer motif encoding polynucleotide
  source 1..21: mol_type = other DNA
atgaatgggggtcatgttatt

SEQ ID NO: 6047 - protein, 7 aa, synthetic construct
  REGION 1..7: note = n-mer motif
VVNVGQT

SEQ ID NO: 6048 - DNA, 21 bp, synthetic construct
  misc_feature 1..21: note = n-mer motif encoding polynucleotide
  source 1..21: mol_type = other DNA
gtagtgaacgtcggacaaact

SEQ ID NO: 6049 - protein, 7 aa, synthetic construct
  REGION 1..7: note = n-mer motif
GLTEYTA

SEQ ID NO: 6050 - DNA, 21 bp, synthetic construct
  misc_feature 1..21: note = n-mer motif encoding polynucleotide
  source 1..21: mol_type = other DNA
ggtctaaccgaatacacagct

SEQ ID NO: 6051 - protein, 7 aa, synthetic construct
  REGION 1..7: note = n-mer motif
ILASPGP

SEQ ID NO: 6052 - DNA, 21 bp, synthetic construct
  misc_feature 1..21: note = n-mer motif encoding polynucleotide
  source 1..21: mol_type = other DNA
atacttgcgtcacccggaccg

SEQ ID NO: 6053 - protein, 7 aa, synthetic construct
  REGION 1..7: note = n-mer motif
VGSVMAS

SEQ ID NO: 6054 - DNA, 21 bp, synthetic construct
  misc_feature 1..21: note = n-mer motif encoding polynucleotide
  source 1..21: mol_type = other DNA
gtggggtcggttatggctagt

SEQ ID NO: 6055 - protein, 7 aa, synthetic construct
  REGION 1..7: note = n-mer motif
SPQGVLA

SEQ ID NO: 6056 - DNA, 21 bp, synthetic construct
  misc_feature 1..21: note = n-mer motif encoding polynucleotide
  source 1..21: mol_type = other DNA
tcgccgcagggggttcttgct

SEQ ID NO: 6057 - protein, 7 aa, synthetic construct
  REGION 1..7: note = n-mer motif
VGPSVLQ

SEQ ID NO: 6058 - DNA, 21 bp, synthetic construct
  misc_feature 1..21: note = n-mer motif encoding polynucleotide
  source 1..21: mol_type = other DNA
gtaggtccatccgtactacaa

SEQ ID NO: 6059 - protein, 7 aa, synthetic construct
  REGION 1..7: note = n-mer motif
GVRDTNI

SEQ ID NO: 6060 - DNA, 21 bp, synthetic construct
  misc_feature 1..21: note = n-mer motif encoding polynucleotide
  source 1..21: mol_type = other DNA
ggagttcgagacacaaacata

SEQ ID NO: 6061 - protein, 7 aa, synthetic construct
  REGION 1..7: note = n-mer motif
ALQSAQV

SEQ ID NO: 6062 - DNA, 21 bp, synthetic construct
  misc_feature 1..21: note = n-mer motif encoding polynucleotide
  source 1..21: mol_type = other DNA
gcactacaatctgcacaagtt

SEQ ID NO: 6063 - protein, 7 aa, synthetic construct
  REGION 1..7: note = n-mer motif
GGVSATA

SEQ ID NO: 6064 - DNA, 21 bp, synthetic construct
  misc_feature 1..21: note = n-mer motif encoding polynucleotide
  source 1..21: mol_type = other DNA
ggaggagtcagcgcaacggct

SEQ ID NO: 6065 - protein, 7 aa, synthetic construct
  REGION 1..7: note = n-mer motif
NPSPTET

SEQ ID NO: 6066 - DNA, 21 bp, synthetic construct
  misc_feature 1..21: note = n-mer motif encoding polynucleotide
  source 1..21: mol_type = other DNA
aaccctagcccgaccgaaacc

SEQ ID NO: 6067 - protein, 7 aa, synthetic construct
  REGION 1..7: note = n-mer motif
AIVSIAR

SEQ ID NO: 6068 - DNA, 21 bp, synthetic construct
  misc_feature 1..21: note = n-mer motif encoding polynucleotide
  source 1..21: mol_type = other DNA
gcgattgtgtcgattgctcgg

SEQ ID NO: 6069 - protein, 7 aa, synthetic construct
  REGION 1..7: note = n-mer motif
AVPREGM

SEQ ID NO: 6070 - DNA, 21 bp, synthetic construct
  misc_feature 1..21: note = n-mer motif encoding polynucleotide
  source 1..21: mol_type = other DNA
gccgtcccgcgcgaaggaatg

SEQ ID NO: 6071 - protein, 7 aa, synthetic construct
  REGION 1..7: note = n-mer motif
PGAHYQA

SEQ ID NO: 6072 - DNA, 21 bp, synthetic construct
  misc_feature 1..21: note = n-mer motif encoding polynucleotide
  source 1..21: mol_type = other DNA
ccgggtgcgcattatcaggct

SEQ ID NO: 6073 - protein, 7 aa, synthetic construct
  REGION 1..7: note = n-mer motif
SPPSSQR

SEQ ID NO: 6074 - DNA, 21 bp, synthetic construct
  misc_feature 1..21: note = n-mer motif encoding polynucleotide
  source 1..21: mol_type = other DNA
tcacccccttcatcccaacgc

SEQ ID NO: 6075 - protein, 7 aa, synthetic construct
  REGION 1..7: note = n-mer motif
RSNTGEW

SEQ ID NO: 6076 - DNA, 21 bp, synthetic construct
  misc_feature 1..21: note = n-mer motif encoding polynucleotide
  source 1..21: mol_type = other DNA
cggtcaaacaccggcgaatgg

SEQ ID NO: 6077 - protein, 7 aa, synthetic construct
  REGION 1..7: note = n-mer motif
HLYTGTG

SEQ ID NO: 6078 - DNA, 21 bp, synthetic construct
  misc_feature 1..21: note = n-mer motif encoding polynucleotide
  source 1..21: mol_type = other DNA
cacttatacactggcaccgga

SEQ ID NO: 6079 - protein, 7 aa, synthetic construct
  REGION 1..7: note = n-mer motif
NGPMKAD

SEQ ID NO: 6080 - DNA, 21 bp, synthetic construct
  misc_feature 1..21: note = n-mer motif encoding polynucleotide
  source 1..21: mol_type = other DNA
aacggtccaatgaaagcagac

SEQ ID NO: 6081 - protein, 7 aa, synthetic construct
  REGION 1..7: note = n-mer motif
AADTSVR

SEQ ID NO: 6082 - DNA, 21 bp, synthetic construct
  misc_feature 1..21: note = n-mer motif encoding polynucleotide
  source 1..21: mol_type = other DNA
gcggcggatacttctgtgcgg

SEQ ID NO: 6083 - protein, 7 aa, synthetic construct
  REGION 1..7: note = n-mer motif
GLEKMTS

SEQ ID NO: 6084 - DNA, 21 bp, synthetic construct
  misc_feature 1..21: note = n-mer motif encoding polynucleotide
  source 1..21: mol_type = other DNA
ggtctggagaagatgacttct

SEQ ID NO: 6085 - protein, 7 aa, synthetic construct
  REGION 1..7: note = n-mer motif
IIISSAN

SEQ ID NO: 6086 - DNA, 21 bp, synthetic construct
  misc_feature 1..21: note = n-mer motif encoding polynucleotide
  source 1..21: mol_type = other DNA
ataatcatatcctcggccaac

SEQ ID NO: 6087 - protein, 7 aa, synthetic construct
  REGION 1..7: note = n-mer motif
GLVKMPT

SEQ ID NO: 6088 - DNA, 21 bp, synthetic construct
  misc_feature 1..21: note = n-mer motif encoding polynucleotide
  source 1..21: mol_type = other DNA
ggtctggtgaagatgcctact

SEQ ID NO: 6089 - protein, 7 aa, synthetic construct
  REGION 1..7: note = n-mer motif
SLPPYGR

SEQ ID NO: 6090 - DNA, 21 bp, synthetic construct
  misc_feature 1..21: note = n-mer motif encoding polynucleotide
  source 1..21: mol_type = other DNA
agcctgcccccctacggccgt

SEQ ID NO: 6091 - protein, 7 aa, synthetic construct
  REGION 1..7: note = n-mer motif
TSLGLMQ

SEQ ID NO: 6092 - DNA, 21 bp, synthetic construct
  misc_feature 1..21: note = n-mer motif encoding polynucleotide
  source 1..21: mol_type = other DNA
actagccttggcttaatgcaa

SEQ ID NO: 6093 - protein, 7 aa, synthetic construct
  REGION 1..7: note = n-mer motif
LSRGAEN

SEQ ID NO: 6094 - DNA, 21 bp, synthetic construct
  misc_feature 1..21: note = n-mer motif encoding polynucleotide
  source 1..21: mol_type = other DNA
ctttcgaggggtgcggagaat

SEQ ID NO: 6095 - protein, 7 aa, synthetic construct
  REGION 1..7: note = n-mer motif
AVKEYEL

SEQ ID NO: 6096 - DNA, 21 bp, synthetic construct
  misc_feature 1..21: note = n-mer motif encoding polynucleotide
  source 1..21: mol_type = other DNA
gccgttaaagaatacgaactc

SEQ ID NO: 6097 - protein, 7 aa, synthetic construct
  REGION 1..7: note = n-mer motif
TTPSPRT

SEQ ID NO: 6098 - DNA, 21 bp, synthetic construct
  misc_feature 1..21: note = n-mer motif encoding polynucleotide
  source 1..21: mol_type = other DNA
acgacccctagcccacgaaca

SEQ ID NO: 6099 - protein, 7 aa, synthetic construct
  REGION 1..7: note = n-mer motif
HGTLVSK

SEQ ID NO: 6100 - DNA, 21 bp, synthetic construct
  misc_feature 1..21: note = n-mer motif encoding polynucleotide
  source 1..21: mol_type = other DNA
cacggcacccttgtttccaaa

SEQ ID NO: 6101 - protein, 7 aa, synthetic construct
  REGION 1..7: note = n-mer motif
VTELTQV

SEQ ID NO: 6102 - DNA, 21 bp, synthetic construct
  misc_feature 1..21: note = n-mer motif encoding polynucleotide
  source 1..21: mol_type = other DNA
gtcaccgaactcacacaagtc

SEQ ID NO: 6103 - protein, 7 aa, synthetic construct
  REGION 1..7: note = n-mer motif
NGNMATF

SEQ ID NO: 6104 - DNA, 21 bp, synthetic construct
  misc_feature 1..21: note = n-mer motif encoding polynucleotide
  source 1..21: mol_type = other DNA
aatgggaatatggcgactttt

SEQ ID NO: 6105 - protein, 7 aa, synthetic construct
  REGION 1..7: note = n-mer motif
EGGDSGG

SEQ ID NO: 6106 - DNA, 21 bp, synthetic construct
  misc_feature 1..21: note = n-mer motif encoding polynucleotide
  source 1..21: mol_type = other DNA
gaaggcggagacagcggtgga

SEQ ID NO: 6107 - protein, 7 aa, synthetic construct
  REGION 1..7: note = n-mer motif
MGDIVTL

SEQ ID NO: 6108 - DNA, 21 bp, synthetic construct
  misc_feature 1..21: note = n-mer motif encoding polynucleotide
  source 1..21: mol_type = other DNA
atgggggatattgttacgctt

SEQ ID NO: 6109 - protein, 7 aa, synthetic construct
  REGION 1..7: note = n-mer motif
LIVTENQ

SEQ ID NO: 6110 - DNA, 21 bp, synthetic construct
  misc_feature 1..21: note = n-mer motif encoding polynucleotide
  source 1..21: mol_type = other DNA
ttgattgtgacggagaatcag

SEQ ID NO: 6111 - protein, 7 aa, synthetic construct
  REGION 1..7: note = n-mer motif
SVATGVL

SEQ ID NO: 6112 - DNA, 21 bp, synthetic construct
  misc_feature 1..21: note = n-mer motif encoding polynucleotide
  source 1..21: mol_type = other DNA
agcgtggctacaggcgtgctc

SEQ ID NO: 6113 - protein, 7 aa, synthetic construct
  REGION 1..7: note = n-mer motif
VSPSVLQ

SEQ ID NO: 6114 - DNA, 21 bp, synthetic construct
  misc_feature 1..21: note = n-mer motif encoding polynucleotide
  source 1..21: mol_type = other DNA
gttagtccttcggtgcttcag

SEQ ID NO: 6115 - protein, 7 aa, synthetic construct
  REGION 1..7: note = n-mer motif
VTGLTVQ

SEQ ID NO: 6116 - DNA, 21 bp, synthetic construct
  misc_feature 1..21: note = n-mer motif encoding polynucleotide
  source 1..21: mol_type = other DNA
gttaccgggctgacagtacaa

SEQ ID NO: 6117 - protein, 7 aa, synthetic construct
  REGION 1..7: note = n-mer motif
ASQDRGS

SEQ ID NO: 6118 - DNA, 21 bp, synthetic construct
  misc_feature 1..21: note = n-mer motif encoding polynucleotide
  source 1..21: mol_type = other DNA
gcatctcaagaccggggctct

SEQ ID NO: 6119 - protein, 7 aa, synthetic construct
  REGION 1..7: note = n-mer motif
SSVSSPR

SEQ ID NO: 6120 - DNA, 21 bp, synthetic construct
  misc_feature 1..21: note = n-mer motif encoding polynucleotide
  source 1..21: mol_type = other DNA
tccagcgtctcctctcctcgc

SEQ ID NO: 6121 - protein, 7 aa, synthetic construct
  REGION 1..7: note = n-mer motif
PILGAST

SEQ ID NO: 6122 - DNA, 21 bp, synthetic construct
  misc_feature 1..21: note = n-mer motif encoding polynucleotide
  source 1..21: mol_type = other DNA
ccgattcttggtgctagtacg

SEQ ID NO: 6123 - protein, 7 aa, synthetic construct
  REGION 1..7: note = n-mer motif
SQLSVML

SEQ ID NO: 6124 - DNA, 21 bp, synthetic construct
  misc_feature 1..21: note = n-mer motif encoding polynucleotide
  source 1..21: mol_type = other DNA
agccaactttcagtaatgctt

SEQ ID NO: 6125 - protein, 7 aa, synthetic construct
  REGION 1..7: note = n-mer motif
TDALTSK

SEQ ID NO: 6126 - DNA, 21 bp, synthetic construct
  misc_feature 1..21: note = n-mer motif encoding polynucleotide
  source 1..21: mol_type = other DNA
acagacgcactcaccagtaaa

SEQ ID NO: 6127 - protein, 7 aa, synthetic construct
  REGION 1..7: note = n-mer motif
YLEGTLL

SEQ ID NO: 6128 - DNA, 21 bp, synthetic construct
  misc_feature 1..21: note = n-mer motif encoding polynucleotide
  source 1..21: mol_type = other DNA
tacctggaagggacattgctc

SEQ ID NO: 6129 - protein, 7 aa, synthetic construct
  REGION 1..7: note = n-mer motif
YQRTESL

SEQ ID NO: 6130 - DNA, 21 bp, synthetic construct
  misc_feature 1..21: note = n-mer motif encoding polynucleotide
  source 1..21: mol_type = other DNA
tatcagaggacggagtctctg

SEQ ID NO: 6131 - protein, 7 aa, synthetic construct
  REGION 1..7: note = n-mer motif
QGGGSLN

SEQ ID NO: 6132 - DNA, 21 bp, synthetic construct
  misc_feature 1..21: note = n-mer motif encoding polynucleotide
  source 1..21: mol_type = other DNA
cagggggggggtagtctgaat

SEQ ID NO: 6133 - protein, 7 aa, synthetic construct
  REGION 1..7: note = n-mer motif
PGSEIRG

SEQ ID NO: 6134 - DNA, 21 bp, synthetic construct
  misc_feature 1..21: note = n-mer motif encoding polynucleotide
  source 1..21: mol_type = other DNA
cctggctccgaaataagaggc

SEQ ID NO: 6135 - protein, 7 aa, synthetic construct
  REGION 1..7: note = n-mer motif
PSRGITL

SEQ ID NO: 6136 - DNA, 21 bp, synthetic construct
  misc_feature 1..21: note = n-mer motif encoding polynucleotide
  source 1..21: mol_type = other DNA
ccgagtcgtggtattactctt

SEQ ID NO: 6137 - protein, 7 aa, synthetic construct
  REGION 1..7: note = n-mer motif
GVAGTDS

SEQ ID NO: 6138 - DNA, 21 bp, synthetic construct
  misc_feature 1..21: note = n-mer motif encoding polynucleotide
  source 1..21: mol_type = other DNA
ggggtggctgggacggattct

SEQ ID NO: 6139 - protein, 7 aa, synthetic construct
  REGION 1..7: note = n-mer motif
MNGGHVM

SEQ ID NO: 6140 - DNA, 21 bp, synthetic construct
  misc_feature 1..21: note = n-mer motif encoding polynucleotide
  source 1..21: mol_type = other DNA
atgaacggtggacacgtgatg

SEQ ID NO: 6141 - protein, 7 aa, synthetic construct
  REGION 1..7: note = n-mer motif
TVPNTDL

SEQ ID NO: 6142 - DNA, 21 bp, synthetic construct
  misc_feature 1..21: note = n-mer motif encoding polynucleotide
  source 1..21: mol_type = other DNA
actgtgcctaatactgatttg

SEQ ID NO: 6143 - protein, 7 aa, synthetic construct
  REGION 1..7: note = n-mer motif
GHQALNA

SEQ ID NO: 6144 - DNA, 21 bp, synthetic construct
  misc_feature 1..21: note = n-mer motif encoding polynucleotide
  source 1..21: mol_type = other DNA
ggccaccaagcattaaacgcc

SEQ ID NO: 6145 - protein, 7 aa, synthetic construct
  REGION 1..7: note = n-mer motif
DPKTGWR

SEQ ID NO: 6146 - DNA, 21 bp, synthetic construct
  misc_feature 1..21: note = n-mer motif encoding polynucleotide
  source 1..21: mol_type = other DNA
gatccgaagactgggtggcgt

SEQ ID NO: 6147 - protein, 7 aa, synthetic construct
  REGION 1..7: note = n-mer motif
VTQAVYV

SEQ ID NO: 6148 - DNA, 21 bp, synthetic construct
  misc_feature 1..21: note = n-mer motif encoding polynucleotide
  source 1..21: mol_type = other DNA
gttacgcaggctgtttatgtt

SEQ ID NO: 6149 - protein, 7 aa, synthetic construct
  REGION 1..7: note = n-mer motif
FETGGVS

SEQ ID NO: 6150 - DNA, 21 bp, synthetic construct
  misc_feature 1..21: note = n-mer motif encoding polynucleotide
  source 1..21: mol_type = other DNA
ttcgaaaccggaggcgtttcc

SEQ ID NO: 6151 - protein, 7 aa, synthetic construct
  REGION 1..7: note = n-mer motif
IADMGGN

SEQ ID NO: 6152 - DNA, 21 bp, synthetic construct
  misc_feature 1..21: note = n-mer motif encoding polynucleotide
  source 1..21: mol_type = other DNA
attgctgatatgggtggtaat

SEQ ID NO: 6153 - protein, 7 aa, synthetic construct
  REGION 1..7: note = n-mer motif
PGYSSQT

SEQ ID NO: 6154 - DNA, 21 bp, synthetic construct
  misc_feature 1..21: note = n-mer motif encoding polynucleotide
  source 1..21: mol_type = other DNA
ccggggtatagttctcagacg

SEQ ID NO: 6155 - protein, 7 aa, synthetic construct
  REGION 1..7: note = n-mer motif
LLLGVQS

SEQ ID NO: 6156 - DNA, 21 bp, synthetic construct
  misc_feature 1..21: note = n-mer motif encoding polynucleotide
  source 1..21: mol_type = other DNA
ctcctattaggagtacaatcg

SEQ ID NO: 6157 - protein, 7 aa, synthetic construct
  REGION 1..7: note = n-mer motif
AVDSSVR

SEQ ID NO: 6158 - DNA, 21 bp, synthetic construct
  misc_feature 1..21: note = n-mer motif encoding polynucleotide
  source 1..21: mol_type = other DNA
gctgttgactccagcgttaga

SEQ ID NO: 6159 - protein, 7 aa, synthetic construct
  REGION 1..7: note = n-mer motif
YESTRGQ

SEQ ID NO: 6160 - DNA, 21 bp, synthetic construct
  misc_feature 1..21: note = n-mer motif encoding polynucleotide
  source 1..21: mol_type = other DNA
tatgagtcgacgaggggtcag

SEQ ID NO: 6161 - protein, 7 aa, synthetic construct
  REGION 1..7: note = n-mer motif
LNSPLHV

SEQ ID NO: 6162 - DNA, 21 bp, synthetic construct
  misc_feature 1..21: note = n-mer motif encoding polynucleotide
  source 1..21: mol_type = other DNA
ctgaatagtccgctgcatgtt

SEQ ID NO: 6163 - protein, 7 aa, synthetic construct
  REGION 1..7: note = n-mer motif
ADTAHPV

SEQ ID NO: 6164 - DNA, 21 bp, synthetic construct
  misc_feature 1..21: note = n-mer motif encoding polynucleotide
  source 1..21: mol_type = other DNA
gccgacaccgcccaccccgtt

SEQ ID NO: 6165 - protein, 7 aa, synthetic construct
  REGION 1..7: note = n-mer motif
LPKGGGF

SEQ ID NO: 6166 - DNA, 21 bp, synthetic construct
  misc_feature 1..21: note = n-mer motif encoding polynucleotide
  source 1..21: mol_type = other DNA
ctgccgaaggggggggggttt

SEQ ID NO: 6167 - protein, 7 aa, synthetic construct
  REGION 1..7: note = n-mer motif
EGVSALL

SEQ ID NO: 6168 - DNA, 21 bp, synthetic construct
  misc_feature 1..21: note = n-mer motif encoding polynucleotide
  source 1..21: mol_type = other DNA
gagggtgtttctgcgttgttg

SEQ ID NO: 6169 - protein, 7 aa, synthetic construct
  REGION 1..7: note = n-mer motif
PNERLTL

SEQ ID NO: 6170 - DNA, 21 bp, synthetic construct
  misc_feature 1..21: note = n-mer motif encoding polynucleotide
  source 1..21: mol_type = other DNA
ccaaacgaacgtttgacctta

SEQ ID NO: 6171 - protein, 7 aa, synthetic construct
  REGION 1..7: note = n-mer motif
SGGLMTG

SEQ ID NO: 6172 - DNA, 21 bp, synthetic construct
  misc_feature 1..21: note = n-mer motif encoding polynucleotide
  source 1..21: mol_type = other DNA
agtggtggtcttatgactggt

SEQ ID NO: 6173 - protein, 7 aa, synthetic construct
  REGION 1..7: note = n-mer motif
VIETRLS

SEQ ID NO: 6174 - DNA, 21 bp, synthetic construct
  misc_feature 1..21: note = n-mer motif encoding polynucleotide
  source 1..21: mol_type = other DNA
gtcatcgaaactcgcctttcc

SEQ ID NO: 6175 - protein, 7 aa, synthetic construct
  REGION 1..7: note = n-mer motif
LANMLQV

SEQ ID NO: 6176 - DNA, 21 bp, synthetic construct
  misc_feature 1..21: note = n-mer motif encoding polynucleotide
  source 1..21: mol_type = other DNA
ttggcaaacatgcttcaagtg

SEQ ID NO: 6177 - protein, 7 aa, synthetic construct
  REGION 1..7: note = n-mer motif
SPTSSPH

SEQ ID NO: 6178 - DNA, 21 bp, synthetic construct
  misc_feature 1..21: note = n-mer motif encoding polynucleotide
  source 1..21: mol_type = other DNA
tcacctacatcctcaccacac

SEQ ID NO: 6179 - protein, 7 aa, synthetic construct
  REGION 1..7: note = n-mer motif
GVGGTYS

SEQ ID NO: 6180 - DNA, 21 bp, synthetic construct
  misc_feature 1..21: note = n-mer motif encoding polynucleotide
  source 1..21: mol_type = other DNA
ggagttgggggcacatacagt

SEQ ID NO: 6181 - protein, 7 aa, synthetic construct
  REGION 1..7: note = n-mer motif
AAESSVR

SEQ ID NO: 6182 - DNA, 21 bp, synthetic construct
  misc_feature 1..21: note = n-mer motif encoding polynucleotide
  source 1..21: mol_type = other DNA
gcggcggagagttctgtgcgg

SEQ ID NO: 6183 - protein, 7 aa, synthetic construct
  REGION 1..7: note = n-mer motif
MNDAGRD

SEQ ID NO: 6184 - DNA, 21 bp, synthetic construct
  misc_feature 1..21: note = n-mer motif encoding polynucleotide
  source 1..21: mol_type = other DNA
atgaatgatgctgggcgtgat

SEQ ID NO: 6185 - protein, 7 aa, synthetic construct
  REGION 1..7: note = n-mer motif
GISGEVS

SEQ ID NO: 6186 - DNA, 21 bp, synthetic construct
  misc_feature 1..21: note = n-mer motif encoding polynucleotide
  source 1..21: mol_type = other DNA
ggtatttcgggggaggtgagt

SEQ ID NO: 6187 - protein, 7 aa, synthetic construct
  REGION 1..7: note = n-mer motif
PQLIVPK

SEQ ID NO: 6188 - DNA, 21 bp, synthetic construct
  misc_feature 1..21: note = n-mer motif encoding polynucleotide
  source 1..21: mol_type = other DNA
cctcagcttattgttcctaag

SEQ ID NO: 6189 - protein, 7 aa, synthetic construct
  REGION 1..7: note = n-mer motif
LRVTENQ

SEQ ID NO: 6190 - DNA, 21 bp, synthetic construct
  misc_feature 1..21: note = n-mer motif encoding polynucleotide
  source 1..21: mol_type = other DNA
ttgcgtgtgacggagaatcag

SEQ ID NO: 6191 - protein, 7 aa, synthetic construct
  REGION 1..7: note = n-mer motif
TSPGLMV

SEQ ID NO: 6192 - DNA, 21 bp, synthetic construct
  misc_feature 1..21: note = n-mer motif encoding polynucleotide
  source 1..21: mol_type = other DNA
acatcacccggcctgatggtt

SEQ ID NO: 6193 - protein, 7 aa, synthetic construct
  REGION 1..7: note = n-mer motif
TTAAIDR

SEQ ID NO: 6194 - DNA, 21 bp, synthetic construct
  misc_feature 1..21: note = n-mer motif encoding polynucleotide
  source 1..21: mol_type = other DNA
accactgcagccatcgaccga

SEQ ID NO: 6195 - protein, 7 aa, synthetic construct
  REGION 1..7: note = n-mer motif
HGNGYLS

SEQ ID NO: 6196 - DNA, 21 bp, synthetic construct
  misc_feature 1..21: note = n-mer motif encoding polynucleotide
  source 1..21: mol_type = other DNA
cacggaaacgggtacctttca

SEQ ID NO: 6197 - protein, 7 aa, synthetic construct
  REGION 1..7: note = n-mer motif
VVSDYTV

SEQ ID NO: 6198 - DNA, 21 bp, synthetic construct
  misc_feature 1..21: note = n-mer motif encoding polynucleotide
  source 1..21: mol_type = other DNA
gttgttagtgattatactgtg

SEQ ID NO: 6199 - protein, 7 aa, synthetic construct
  REGION 1..7: note = n-mer motif
RLAITER

SEQ ID NO: 6200 - DNA, 21 bp, synthetic construct
  misc_feature 1..21: note = n-mer motif encoding polynucleotide
  source 1..21: mol_type = other DNA
agattggcgattactgagcgg

SEQ ID NO: 6201 - protein, 7 aa, synthetic construct
  REGION 1..7: note = n-mer motif
PGVDTGV

SEQ ID NO: 6202 - DNA, 21 bp, synthetic construct
  misc_feature 1..21: note = n-mer motif encoding polynucleotide
  source 1..21: mol_type = other DNA
cctggtgttgatactggtgtt

SEQ ID NO: 6203 - protein, 7 aa, synthetic construct
  REGION 1..7: note = n-mer motif
DTSASST

SEQ ID NO: 6204 - DNA, 21 bp, synthetic construct
  misc_feature 1..21: note = n-mer motif encoding polynucleotide
  source 1..21: mol_type = other DNA
gatacgtcggcgtcgtcgact

SEQ ID NO: 6205 - protein, 7 aa, synthetic construct
  REGION 1..7: note = n-mer motif
ANEHNIA

SEQ ID NO: 6206 - DNA, 21 bp, synthetic construct
  misc_feature 1..21: note = n-mer motif encoding polynucleotide
  source 1..21: mol_type = other DNA
gctaatgagcataatattgcg

SEQ ID NO: 6207 - protein, 7 aa, synthetic construct
  REGION 1..7: note = n-mer motif
IAHGYST

SEQ ID NO: 6208 - DNA, 21 bp, synthetic construct
  misc_feature 1..21: note = n-mer motif encoding polynucleotide
  source 1..21: mol_type = other DNA
atcgcccacggatacagcaca

SEQ ID NO: 6209 - protein, 7 aa, synthetic construct
  REGION 1..7: note = n-mer motif
SLAISER

SEQ ID NO: 6210 - DNA, 21 bp, synthetic construct
  misc_feature 1..21: note = n-mer motif encoding polynucleotide
  source 1..21: mol_type = other DNA
agcttagccatcagcgaaagg

SEQ ID NO: 6211 - protein, 7 aa, synthetic construct
  REGION 1..7: note = n-mer motif
RDLTTDL

SEQ ID NO: 6212 - DNA, 21 bp, synthetic construct
  misc_feature 1..21: note = n-mer motif encoding polynucleotide
  source 1..21: mol_type = other DNA
cgtgatctgacgactgatctg

SEQ ID NO: 6213 - protein, 7 aa, synthetic construct
  REGION 1..7: note = n-mer motif
EASSRLL

SEQ ID NO: 6214 - DNA, 21 bp, synthetic construct
  misc_feature 1..21: note = n-mer motif encoding polynucleotide
  source 1..21: mol_type = other DNA
gaagcttcgtcgcgacttctc

SEQ ID NO: 6215 - protein, 7 aa, synthetic construct
  REGION 1..7: note = n-mer motif
AVKEYQS

SEQ ID NO: 6216 - DNA, 21 bp, synthetic construct
  misc_feature 1..21: note = n-mer motif encoding polynucleotide
  source 1..21: mol_type = other DNA
gctgttaaagaataccaatct

SEQ ID NO: 6217 - protein, 7 aa, synthetic construct
  REGION 1..7: note = n-mer motif
GIAVGEV

SEQ ID NO: 6218 - DNA, 21 bp, synthetic construct
  misc_feature 1..21: note = n-mer motif encoding polynucleotide
  source 1..21: mol_type = other DNA
ggtattgctgtgggggaggtt

SEQ ID NO: 6219 - protein, 7 aa, synthetic construct
  REGION 1..7: note = n-mer motif
RSITIGP

SEQ ID NO: 6220 - DNA, 21 bp, synthetic construct
  misc_feature 1..21: note = n-mer motif encoding polynucleotide
  source 1..21: mol_type = other DNA
cgttcgattactattgggccg

SEQ ID NO: 6221 - protein, 7 aa, synthetic construct
  REGION 1..7: note = n-mer motif
LGDGTTR

SEQ ID NO: 6222 - DNA, 21 bp, synthetic construct
  misc_feature 1..21: note = n-mer motif encoding polynucleotide
  source 1..21: mol_type = other DNA
ctgggggatggtacgactcgg

SEQ ID NO: 6223 - protein, 7 aa, synthetic construct
  REGION 1..7: note = n-mer motif
ALMSSGV

SEQ ID NO: 6224 - DNA, 21 bp, synthetic construct
  misc_feature 1..21: note = n-mer motif encoding polynucleotide
  source 1..21: mol_type = other DNA
gcgttgatgtcctcgggggtt

SEQ ID NO: 6225 - protein, 7 aa, synthetic construct
  REGION 1..7: note = n-mer motif
TYSDGTT

SEQ ID NO: 6226 - DNA, 21 bp, synthetic construct
  misc_feature 1..21: note = n-mer motif encoding polynucleotide
  source 1..21: mol_type = other DNA
acttatagtgatgggacgact

SEQ ID NO: 6227 - protein, 7 aa, synthetic construct
  REGION 1..7: note = n-mer motif
ASGEVQS

SEQ ID NO: 6228 - DNA, 21 bp, synthetic construct
  misc_feature 1..21: note = n-mer motif encoding polynucleotide
  source 1..21: mol_type = other DNA
gcgtcgggggaggttcagtct

SEQ ID NO: 6229 - protein, 7 aa, synthetic construct
  REGION 1..7: note = n-mer motif
FAGVQQA

SEQ ID NO: 6230 - DNA, 21 bp, synthetic construct
  misc_feature 1..21: note = n-mer motif encoding polynucleotide
  source 1..21: mol_type = other DNA
ttcgcaggagtccaacaagct

SEQ ID NO: 6231 - protein, 7 aa, synthetic construct
  REGION 1..7: note = n-mer motif
ESSRLQI

SEQ ID NO: 6232 - DNA, 21 bp, synthetic construct
  misc_feature 1..21: note = n-mer motif encoding polynucleotide
  source 1..21: mol_type = other DNA
gagagttcgcgtcttcagatt

SEQ ID NO: 6233 - protein, 7 aa, synthetic construct
  REGION 1..7: note = n-mer motif
DSGKDRT

SEQ ID NO: 6234 - DNA, 21 bp, synthetic construct
  misc_feature 1..21: note = n-mer motif encoding polynucleotide
  source 1..21: mol_type = other DNA
gattctggtaaggatcgtacg

SEQ ID NO: 6235 - protein, 7 aa, synthetic construct
  REGION 1..7: note = n-mer motif
MLALAVT

SEQ ID NO: 6236 - DNA, 21 bp, synthetic construct
  misc_feature 1..21: note = n-mer motif encoding polynucleotide
  source 1..21: mol_type = other DNA
atgttggcgctggctgtgacg

SEQ ID NO: 6237 - protein, 7 aa, synthetic construct
  REGION 1..7: note = n-mer motif
GERMGMT

SEQ ID NO: 6238 - DNA, 21 bp, synthetic construct
  misc_feature 1..21: note = n-mer motif encoding polynucleotide
  source 1..21: mol_type = other DNA
ggtgagcggatgggtatgact

SEQ ID NO: 6239 - protein, 7 aa, synthetic construct
  REGION 1..7: note = n-mer motif
MADGASM

SEQ ID NO: 6240 - DNA, 21 bp, synthetic construct
  misc_feature 1..21: note = n-mer motif encoding polynucleotide
  source 1..21: mol_type = other DNA
atggcggatggtgcgtctatg

SEQ ID NO: 6241 - protein, 7 aa, synthetic construct
  REGION 1..7: note = n-mer motif
RHLTSDV

SEQ ID NO: 6242 - DNA, 21 bp, synthetic construct
  misc_feature 1..21: note = n-mer motif encoding polynucleotide
  source 1..21: mol_type = other DNA
cgacacctcacatccgacgtc

SEQ ID NO: 6243 - protein, 7 aa, synthetic construct
  REGION 1..7: note = n-mer motif
EVLSLAP

SEQ ID NO: 6244 - DNA, 21 bp, synthetic construct
  misc_feature 1..21: note = n-mer motif encoding polynucleotide
  source 1..21: mol_type = other DNA
gaggtgctgtctcttgctccg

SEQ ID NO: 6245 - protein, 7 aa, synthetic construct
  REGION 1..7: note = n-mer motif
DIAVSMR

SEQ ID NO: 6246 - DNA, 21 bp, synthetic construct
  misc_feature 1..21: note = n-mer motif encoding polynucleotide
  source 1..21: mol_type = other DNA
gacatcgcggtatcgatgaga

SEQ ID NO: 6247 - protein, 7 aa, synthetic construct
  REGION 1..7: note = n-mer motif
RSAGTST

SEQ ID NO: 6248 - DNA, 21 bp, synthetic construct
  misc_feature 1..21: note = n-mer motif encoding polynucleotide
  source 1..21: mol_type = other DNA
aggtctgcaggaacctccaca

SEQ ID NO: 6249 - protein, 7 aa, synthetic construct
  REGION 1..7: note = n-mer motif
TSYDTVV

SEQ ID NO: 6250 - DNA, 21 bp, synthetic construct
  misc_feature 1..21: note = n-mer motif encoding polynucleotide
  source 1..21: mol_type = other DNA
acatcatacgacaccgtcgtg

SEQ ID NO: 6251 - protein, 7 aa, synthetic construct
  REGION 1..7: note = n-mer motif
VGASTAW

SEQ ID NO: 6252 - DNA, 21 bp, synthetic construct
  misc_feature 1..21: note = n-mer motif encoding polynucleotide
  source 1..21: mol_type = other DNA
gtgggcgccagcaccgcgtgg

SEQ ID NO: 6253 - protein, 7 aa, synthetic construct
  REGION 1..7: note = n-mer motif
RVELTGT

SEQ ID NO: 6254 - DNA, 21 bp, synthetic construct
  misc_feature 1..21: note = n-mer motif encoding polynucleotide
  source 1..21: mol_type = other DNA
cgcgtagaattgaccggcacg

SEQ ID NO: 6255 - protein, 7 aa, synthetic construct
  REGION 1..7: note = n-mer motif
VQGPLTG

SEQ ID NO: 6256 - DNA, 21 bp, synthetic construct
  misc_feature 1..21: note = n-mer motif encoding polynucleotide
  source 1..21: mol_type = other DNA
gtgcagggtccgctgactggt

SEQ ID NO: 6257 - protein, 7 aa, synthetic construct
  REGION 1..7: note = n-mer motif
DRVISSL

SEQ ID NO: 6258 - DNA, 21 bp, synthetic construct
  misc_feature 1..21: note = n-mer motif encoding polynucleotide
  source 1..21: mol_type = other DNA
gatcgggttattagttctttg

SEQ ID NO: 6259 - protein, 7 aa, synthetic construct
  REGION 1..7: note = n-mer motif
PLILSPS

SEQ ID NO: 6260 - DNA, 21 bp, synthetic construct
  misc_feature 1..21: note = n-mer motif encoding polynucleotide
  source 1..21: mol_type = other DNA
cccttgatcttatctccaagt

SEQ ID NO: 6261 - protein, 7 aa, synthetic construct
  REGION 1..7: note = n-mer motif
VRQLDSR

SEQ ID NO: 6262 - DNA, 21 bp, synthetic construct
  misc_feature 1..21: note = n-mer motif encoding polynucleotide
  source 1..21: mol_type = other DNA
gtgaggcagctggattcgcgg

SEQ ID NO: 6263 - protein, 7 aa, synthetic construct
  REGION 1..7: note = n-mer motif
LLAGADR

SEQ ID NO: 6264 - DNA, 21 bp, synthetic construct
  misc_feature 1..21: note = n-mer motif encoding polynucleotide
  source 1..21: mol_type = other DNA
ttgcttgctggtgctgatcgt

SEQ ID NO: 6265 - protein, 7 aa, synthetic construct
  REGION 1..7: note = n-mer motif
YSTERSV

SEQ ID NO: 6266 - DNA, 21 bp, synthetic construct
  misc_feature 1..21: note = n-mer motif encoding polynucleotide
  source 1..21: mol_type = other DNA
tattcgactgagaggtctgtt

SEQ ID NO: 6267 - protein, 7 aa, synthetic construct
  REGION 1..7: note = n-mer motif
GPMASVV

SEQ ID NO: 6268 - DNA, 21 bp, synthetic construct
  misc_feature 1..21: note = n-mer motif encoding polynucleotide
  source 1..21: mol_type = other DNA
gggccgatggcgtctgtggtt

SEQ ID NO: 6269 - protein, 7 aa, synthetic construct
  REGION 1..7: note = n-mer motif
MLGGGAS

SEQ ID NO: 6270 - DNA, 21 bp, synthetic construct
  misc_feature 1..21: note = n-mer motif encoding polynucleotide
  source 1..21: mol_type = other DNA
atgctcggcggaggtgcctcc

SEQ ID NO: 6271 - protein, 7 aa, synthetic construct
  REGION 1..7: note = n-mer motif
LRGQPGV

SEQ ID NO: 6272 - DNA, 21 bp, synthetic construct
  misc_feature 1..21: note = n-mer motif encoding polynucleotide
  source 1..21: mol_type = other DNA
ctgcgcggccaacccggcgtg

SEQ ID NO: 6273 - protein, 7 aa, synthetic construct
  REGION 1..7: note = n-mer motif
GNGTRVL

SEQ ID NO: 6274 - DNA, 21 bp, synthetic construct
  misc_feature 1..21: note = n-mer motif encoding polynucleotide
  source 1..21: mol_type = other DNA
ggaaacggcaccagggtccta

SEQ ID NO: 6275 - protein, 7 aa, synthetic construct
  REGION 1..7: note = n-mer motif
GLVQIVA

SEQ ID NO: 6276 - DNA, 21 bp, synthetic construct
  misc_feature 1..21: note = n-mer motif encoding polynucleotide
  source 1..21: mol_type = other DNA
gggcttgttcagattgttgcg

SEQ ID NO: 6277 - protein, 7 aa, synthetic construct
  REGION 1..7: note = n-mer motif
SFRDTVP

SEQ ID NO: 6278 - DNA, 21 bp, synthetic construct
  misc_feature 1..21: note = n-mer motif encoding polynucleotide
  source 1..21: mol_type = other DNA
agttttagggatacggtgcct

SEQ ID NO: 6279 - protein, 7 aa, synthetic construct
  REGION 1..7: note = n-mer motif
SLNSVKV

SEQ ID NO: 6280 - DNA, 21 bp, synthetic construct
  misc_feature 1..21: note = n-mer motif encoding polynucleotide
  source 1..21: mol_type = other DNA
tccctaaactcggtcaaagtg

SEQ ID NO: 6281 - protein, 7 aa, synthetic construct
  REGION 1..7: note = n-mer motif
HLSRDHS

SEQ ID NO: 6282 - DNA, 21 bp, synthetic construct
  misc_feature 1..21: note = n-mer motif encoding polynucleotide
  source 1..21: mol_type = other DNA
cacctgtcacgtgaccactca

SEQ ID NO: 6283 - protein, 7 aa, synthetic construct
  REGION 1..7: note = n-mer motif
SGDRDQN

SEQ ID NO: 6284 - DNA, 21 bp, synthetic construct
  misc_feature 1..21: note = n-mer motif encoding polynucleotide
  source 1..21: mol_type = other DNA
tctggtgatcgggatcagaat

SEQ ID NO: 6285 - protein, 7 aa, synthetic construct
  REGION 1..7: note = n-mer motif
SGPMKAV

SEQ ID NO: 6286 - DNA, 21 bp, synthetic construct
  misc_feature 1..21: note = n-mer motif encoding polynucleotide
  source 1..21: mol_type = other DNA
agtgggccgatgaaggcggtt

SEQ ID NO: 6287 - protein, 7 aa, synthetic construct
  REGION 1..7: note = n-mer motif
AGGGTPR

SEQ ID NO: 6288 - DNA, 21 bp, synthetic construct
  misc_feature 1..21: note = n-mer motif encoding polynucleotide
  source 1..21: mol_type = other DNA
gcggggggtgggactccgagg

SEQ ID NO: 6289 - protein, 7 aa, synthetic construct
  REGION 1..7: note = n-mer motif
NLRGEHT

SEQ ID NO: 6290 - DNA, 21 bp, synthetic construct
  misc_feature 1..21: note = n-mer motif encoding polynucleotide
  source 1..21: mol_type = other DNA
aatttgcgtggggagcatacg

SEQ ID NO: 6291 - protein, 7 aa, synthetic construct
  REGION 1..7: note = n-mer motif
GGTGEGP

SEQ ID NO: 6292 - DNA, 21 bp, synthetic construct
  misc_feature 1..21: note = n-mer motif encoding polynucleotide
  source 1..21: mol_type = other DNA
ggtgggacgggtgagggtccg

SEQ ID NO: 6293 - protein, 7 aa, synthetic construct
  REGION 1..7: note = n-mer motif
LRVPENQ

SEQ ID NO: 6294 - DNA, 21 bp, synthetic construct
  misc_feature 1..21: note = n-mer motif encoding polynucleotide
  source 1..21: mol_type = other DNA
ttgcgtgtgccggagaatcag

SEQ ID NO: 6295 - protein, 7 aa, synthetic construct
  REGION 1..7: note = n-mer motif
AAGLILN

SEQ ID NO: 6296 - DNA, 21 bp, synthetic construct
  misc_feature 1..21: note = n-mer motif encoding polynucleotide
  source 1..21: mol_type = other DNA
gccgcaggcctcatccttaac

SEQ ID NO: 6297 - protein, 7 aa, synthetic construct
  REGION 1..7: note = n-mer motif
TGERDQN

SEQ ID NO: 6298 - DNA, 21 bp, synthetic construct
  misc_feature 1..21: note = n-mer motif encoding polynucleotide
  source 1..21: mol_type = other DNA
actggtgaacgggatcagaat

SEQ ID NO: 6299 - protein, 7 aa, synthetic construct
  REGION 1..7: note = n-mer motif
TIAAHVP

SEQ ID NO: 6300 - DNA, 21 bp, synthetic construct
  misc_feature 1..21: note = n-mer motif encoding polynucleotide
  source 1..21: mol_type = other DNA
accatagcagcccacgtaccc

SEQ ID NO: 6301 - protein, 7 aa, synthetic construct
  REGION 1..7: note = n-mer motif
SFAITER

SEQ ID NO: 6302 - DNA, 21 bp, synthetic construct
  misc_feature 1..21: note = n-mer motif encoding polynucleotide
  source 1..21: mol_type = other DNA
agttttgcgattactgagcgg

SEQ ID NO: 6303 - protein, 7 aa, synthetic construct
  REGION 1..7: note = n-mer motif
FTIKDNR

SEQ ID NO: 6304 - DNA, 21 bp, synthetic construct
  misc_feature 1..21: note = n-mer motif encoding polynucleotide
  source 1..21: mol_type = other DNA
ttcaccataaaagacaacaga

SEQ ID NO: 6305 - protein, 7 aa, synthetic construct
  REGION 1..7: note = n-mer motif
ESRENVR

SEQ ID NO: 6306 - DNA, 21 bp, synthetic construct
  misc_feature 1..21: note = n-mer motif encoding polynucleotide
  source 1..21: mol_type = other DNA
gaatcccgtgaaaacgtcaga

SEQ ID NO: 6307 - protein, 7 aa, synthetic construct
  REGION 1..7: note = n-mer motif
LPRLGGL

SEQ ID NO: 6308 - DNA, 21 bp, synthetic construct
  misc_feature 1..21: note = n-mer motif encoding polynucleotide
  source 1..21: mol_type = other DNA
cttccgcgtttgggggggctt

SEQ ID NO: 6309 - protein, 7 aa, synthetic construct
  REGION 1..7: note = n-mer motif
GPDTGAK

SEQ ID NO: 6310 - DNA, 21 bp, synthetic construct
  misc_feature 1..21: note = n-mer motif encoding polynucleotide
  source 1..21: mol_type = other DNA
ggtccagacacaggagccaaa

SEQ ID NO: 6311 - protein, 7 aa, synthetic construct
  REGION 1..7: note = n-mer motif
TGGLLYS

SEQ ID NO: 6312 - DNA, 21 bp, synthetic construct
  misc_feature 1..21: note = n-mer motif encoding polynucleotide
  source 1..21: mol_type = other DNA
actggtgggcttctttatagt

SEQ ID NO: 6313 - protein, 7 aa, synthetic construct
  REGION 1..7: note = n-mer motif
RSGSGVA

SEQ ID NO: 6314 - DNA, 21 bp, synthetic construct
  misc_feature 1..21: note = n-mer motif encoding polynucleotide
  source 1..21: mol_type = other DNA
cggtcgggctccggagtcgcc

SEQ ID NO: 6315 - protein, 7 aa, synthetic construct
  REGION 1..7: note = n-mer motif
LTGSIGL

SEQ ID NO: 6316 - DNA, 21 bp, synthetic construct
  misc_feature 1..21: note = n-mer motif encoding polynucleotide
  source 1..21: mol_type = other DNA
ttaactgggtcaattggactc

SEQ ID NO: 6317 - protein, 7 aa, synthetic construct
  REGION 1..7: note = n-mer motif
TLPHAGL

SEQ ID NO: 6318 - DNA, 21 bp, synthetic construct
  misc_feature 1..21: note = n-mer motif encoding polynucleotide
  source 1..21: mol_type = other DNA
accctcccccacgcagggtta

SEQ ID NO: 6319 - protein, 7 aa, synthetic construct
  REGION 1..7: note = n-mer motif
VDHGMGL

SEQ ID NO: 6320 - DNA, 21 bp, synthetic construct
  misc_feature 1..21: note = n-mer motif encoding polynucleotide
  source 1..21: mol_type = other DNA
gttgatcatggtatgggtttg

SEQ ID NO: 6321 - protein, 7 aa, synthetic construct
  REGION 1..7: note = n-mer motif
TVELNHV

SEQ ID NO: 6322 - DNA, 21 bp, synthetic construct
  misc_feature 1..21: note = n-mer motif encoding polynucleotide
  source 1..21: mol_type = other DNA
acggttgagctgaatcatgtt

SEQ ID NO: 6323 - protein, 7 aa, synthetic construct
  REGION 1..7: note = n-mer motif
VLSSDLR

SEQ ID NO: 6324 - DNA, 21 bp, synthetic construct
  misc_feature 1..21: note = n-mer motif encoding polynucleotide
  source 1..21: mol_type = other DNA
gtgctttcgagtgatcttcgt

SEQ ID NO: 6325 - protein, 7 aa, synthetic construct
  REGION 1..7: note = n-mer motif
TLTYTET

SEQ ID NO: 6326 - DNA, 21 bp, synthetic construct
  misc_feature 1..21: note = n-mer motif encoding polynucleotide
  source 1..21: mol_type = other DNA
acattgacatacactgaaacc

SEQ ID NO: 6327 - protein, 7 aa, synthetic construct
  REGION 1..7: note = n-mer motif
FIDSQLG

SEQ ID NO: 6328 - DNA, 21 bp, synthetic construct
  misc_feature 1..21: note = n-mer motif encoding polynucleotide
  source 1..21: mol_type = other DNA
tttattgatagtcagctgggt

SEQ ID NO: 6329 - protein, 7 aa, synthetic construct
  REGION 1..7: note = n-mer motif
FSTNSNH

SEQ ID NO: 6330 - DNA, 21 bp, synthetic construct
  misc_feature 1..21: note = n-mer motif encoding polynucleotide
  source 1..21: mol_type = other DNA
ttctcgaccaacagcaaccac

SEQ ID NO: 6331 - protein, 7 aa, synthetic construct
  REGION 1..7: note = n-mer motif
MGASDTL

SEQ ID NO: 6332 - DNA, 21 bp, synthetic construct
  misc_feature 1..21: note = n-mer motif encoding polynucleotide
  source 1..21: mol_type = other DNA
atgggggctagtgatacgctt

SEQ ID NO: 6333 - protein, 7 aa, synthetic construct
  REGION 1..7: note = n-mer motif
TTGKVSG

SEQ ID NO: 6334 - DNA, 21 bp, synthetic construct
  misc_feature 1..21: note = n-mer motif encoding polynucleotide
  source 1..21: mol_type = other DNA
accacgggtaaagtgtcgggg

SEQ ID NO: 6335 - protein, 7 aa, synthetic construct
  REGION 1..7: note = n-mer motif
MDELRGR

SEQ ID NO: 6336 - DNA, 21 bp, synthetic construct
  misc_feature 1..21: note = n-mer motif encoding polynucleotide
  source 1..21: mol_type = other DNA
atggacgaattacgcggcaga

SEQ ID NO: 6337 - protein, 7 aa, synthetic construct
  REGION 1..7: note = n-mer motif
SVDNGLL

SEQ ID NO: 6338 - DNA, 21 bp, synthetic construct
  misc_feature 1..21: note = n-mer motif encoding polynucleotide
  source 1..21: mol_type = other DNA
tccgtcgacaacggcttactg

SEQ ID NO: 6339 - protein, 7 aa, synthetic construct
  REGION 1..7: note = n-mer motif
TGMQVSI

SEQ ID NO: 6340 - DNA, 21 bp, synthetic construct
  misc_feature 1..21: note = n-mer motif encoding polynucleotide
  source 1..21: mol_type = other DNA
accggtatgcaagtgtcgatc

SEQ ID NO: 6341 - protein, 7 aa, synthetic construct
  REGION 1..7: note = n-mer motif
SVVSGLL

SEQ ID NO: 6342 - DNA, 21 bp, synthetic construct
  misc_feature 1..21: note = n-mer motif encoding polynucleotide
  source 1..21: mol_type = other DNA
tctgtggtgtcaggtcttttg

SEQ ID NO: 6343 - protein, 7 aa, synthetic construct
  REGION 1..7: note = n-mer motif
EQYLGSP

SEQ ID NO: 6344 - DNA, 21 bp, synthetic construct
  misc_feature 1..21: note = n-mer motif encoding polynucleotide
  source 1..21: mol_type = other DNA
gagcagtatctgggttctccg

SEQ ID NO: 6345 - protein, 7 aa, synthetic construct
  REGION 1..7: note = n-mer motif
LSHTEGD

SEQ ID NO: 6346 - DNA, 21 bp, synthetic construct
  misc_feature 1..21: note = n-mer motif encoding polynucleotide
  source 1..21: mol_type = other DNA
ttatcacacaccgaaggggac

SEQ ID NO: 6347 - protein, 7 aa, synthetic construct
  REGION 1..7: note = n-mer motif
DFSVAHT

SEQ ID NO: 6348 - DNA, 21 bp, synthetic construct
  misc_feature 1..21: note = n-mer motif encoding polynucleotide
  source 1..21: mol_type = other DNA
gacttctctgtagcgcacact

SEQ ID NO: 6349 - protein, 7 aa, synthetic construct
  REGION 1..7: note = n-mer motif
MATPTNT

SEQ ID NO: 6350 - DNA, 21 bp, synthetic construct
  misc_feature 1..21: note = n-mer motif encoding polynucleotide
  source 1..21: mol_type = other DNA
atggcaacgccaactaacacc

SEQ ID NO: 6351 - protein, 7 aa, synthetic construct
  REGION 1..7: note = n-mer motif
NTEDRRV

SEQ ID NO: 6352 - DNA, 21 bp, synthetic construct
  misc_feature 1..21: note = n-mer motif encoding polynucleotide
  source 1..21: mol_type = other DNA
aacacagaagaccggcgagtt

SEQ ID NO: 6353 - protein, 7 aa, synthetic construct
  REGION 1..7: note = n-mer motif
AGVLKAL

SEQ ID NO: 6354 - DNA, 21 bp, synthetic construct
  misc_feature 1..21: note = n-mer motif encoding polynucleotide
  source 1..21: mol_type = other DNA
gcaggagtattaaaagccctc

SEQ ID NO: 6355 - protein, 7 aa, synthetic construct
  REGION 1..7: note = n-mer motif
NAHALMV

SEQ ID NO: 6356 - DNA, 21 bp, synthetic construct
  misc_feature 1..21: note = n-mer motif encoding polynucleotide
  source 1..21: mol_type = other DNA
aacgcccacgcactcatggtc

SEQ ID NO: 6357 - protein, 7 aa, synthetic construct
  REGION 1..7: note = n-mer motif
VHVDNSN

SEQ ID NO: 6358 - DNA, 21 bp, synthetic construct
  misc_feature 1..21: note = n-mer motif encoding polynucleotide
  source 1..21: mol_type = other DNA
gtgcatgttgataatagtaat

SEQ ID NO: 6359 - protein, 7 aa, synthetic construct
  REGION 1..7: note = n-mer motif
LSIRQGP

SEQ ID NO: 6360 - DNA, 21 bp, synthetic construct
  misc_feature 1..21: note = n-mer motif encoding polynucleotide
  source 1..21: mol_type = other DNA
ttgagtattcgtcagggtcct

SEQ ID NO: 6361 - protein, 7 aa, synthetic construct
  REGION 1..7: note = n-mer motif
GVNHAVA

SEQ ID NO: 6362 - DNA, 21 bp, synthetic construct
  misc_feature 1..21: note = n-mer motif encoding polynucleotide
  source 1..21: mol_type = other DNA
ggagtcaaccacgccgtcgcc

SEQ ID NO: 6363 - protein, 7 aa, synthetic construct
  REGION 1..7: note = n-mer motif
AYVTQGG

SEQ ID NO: 6364 - DNA, 21 bp, synthetic construct
  misc_feature 1..21: note = n-mer motif encoding polynucleotide
  source 1..21: mol_type = other DNA
gcctacgtaacacaaggcggc

SEQ ID NO: 6365 - protein, 7 aa, synthetic construct
  REGION 1..7: note = n-mer motif
WDDQTSG

SEQ ID NO: 6366 - DNA, 21 bp, synthetic construct
  misc_feature 1..21: note = n-mer motif encoding polynucleotide
  source 1..21: mol_type = other DNA
tgggatgatcagacttcgggg

SEQ ID NO: 6367 - protein, 7 aa, synthetic construct
  REGION 1..7: note = n-mer motif
LDLTSDV

SEQ ID NO: 6368 - DNA, 21 bp, synthetic construct
  misc_feature 1..21: note = n-mer motif encoding polynucleotide
  source 1..21: mol_type = other DNA
cttgatctgacgtctgatgtg

SEQ ID NO: 6369 - protein, 7 aa, synthetic construct
  REGION 1..7: note = n-mer motif
IPSDFPN

SEQ ID NO: 6370 - DNA, 21 bp, synthetic construct
  misc_feature 1..21: note = n-mer motif encoding polynucleotide
  source 1..21: mol_type = other DNA
ataccatccgacttcccgaac

SEQ ID NO: 6371 - protein, 7 aa, synthetic construct
  REGION 1..7: note = n-mer motif
SLVRGLL

SEQ ID NO: 6372 - DNA, 21 bp, synthetic construct
  misc_feature 1..21: note = n-mer motif encoding polynucleotide
  source 1..21: mol_type = other DNA
agtcttgttcggggtttgctg

SEQ ID NO: 6373 - protein, 7 aa, synthetic construct
  REGION 1..7: note = n-mer motif
IVYAVGE

SEQ ID NO: 6374 - DNA, 21 bp, synthetic construct
  misc_feature 1..21: note = n-mer motif encoding polynucleotide
  source 1..21: mol_type = other DNA
atagtctacgctgttggagaa

SEQ ID NO: 6375 - protein, 7 aa, synthetic construct
  REGION 1..7: note = n-mer motif
LAGLGGM

SEQ ID NO: 6376 - DNA, 21 bp, synthetic construct
  misc_feature 1..21: note = n-mer motif encoding polynucleotide
  source 1..21: mol_type = other DNA
ctagctggcctcggtggaatg

SEQ ID NO: 6377 - protein, 7 aa, synthetic construct
  REGION 1..7: note = n-mer motif
SDEAYRA

SEQ ID NO: 6378 - DNA, 21 bp, synthetic construct
  misc_feature 1..21: note = n-mer motif encoding polynucleotide
  source 1..21: mol_type = other DNA
agcgatgaggcttatcgtgcg

SEQ ID NO: 6379 - protein, 7 aa, synthetic construct
  REGION 1..7: note = n-mer motif
VGQVPGR

SEQ ID NO: 6380 - DNA, 21 bp, synthetic construct
  misc_feature 1..21: note = n-mer motif encoding polynucleotide
  source 1..21: mol_type = other DNA
gtggggcaagtcccgggtagg

SEQ ID NO: 6381 - protein, 7 aa, synthetic construct
  REGION 1..7: note = n-mer motif
SVDSALL

SEQ ID NO: 6382 - DNA, 21 bp, synthetic construct
  misc_feature 1..21: note = n-mer motif encoding polynucleotide
  source 1..21: mol_type = other DNA
tccgtggactctgctttgctg

SEQ ID NO: 6383 - protein, 7 aa, synthetic construct
  REGION 1..7: note = n-mer motif
LSLRDGV

SEQ ID NO: 6384 - DNA, 21 bp, synthetic construct
  misc_feature 1..21: note = n-mer motif encoding polynucleotide
  source 1..21: mol_type = other DNA
ctatcccttagggacggagtc

SEQ ID NO: 6385 - protein, 7 aa, synthetic construct
  REGION 1..7: note = n-mer motif
STIPTPM

SEQ ID NO: 6386 - DNA, 21 bp, synthetic construct
  misc_feature 1..21: note = n-mer motif encoding polynucleotide
  source 1..21: mol_type = other DNA
tccacaatcccaacccccatg

SEQ ID NO: 6387 - protein, 7 aa, synthetic construct
  REGION 1..7: note = n-mer motif
IPRIHSL

SEQ ID NO: 6388 - DNA, 21 bp, synthetic construct
  misc_feature 1..21: note = n-mer motif encoding polynucleotide
  source 1..21: mol_type = other DNA
attcctcggattcattctctt

SEQ ID NO: 6389 - protein, 7 aa, synthetic construct
  REGION 1..7: note = n-mer motif
LSGIMVS

SEQ ID NO: 6390 - DNA, 21 bp, synthetic construct
  misc_feature 1..21: note = n-mer motif encoding polynucleotide
  source 1..21: mol_type = other DNA
ttgtcggggattatggtttcg

SEQ ID NO: 6391 - protein, 7 aa, synthetic construct
  REGION 1..7: note = n-mer motif
GFVQSRM

SEQ ID NO: 6392 - DNA, 21 bp, synthetic construct
  misc_feature 1..21: note = n-mer motif encoding polynucleotide
  source 1..21: mol_type = other DNA
gggtttgttcagagtcggatg

SEQ ID NO: 6393 - protein, 7 aa, synthetic construct
  REGION 1..7: note = n-mer motif
SSQGTTK

SEQ ID NO: 6394 - DNA, 21 bp, synthetic construct
  misc_feature 1..21: note = n-mer motif encoding polynucleotide
  source 1..21: mol_type = other DNA
tcttcgcagggtacgactaag

SEQ ID NO: 6395 - protein, 7 aa, synthetic construct
  REGION 1..7: note = n-mer motif
NHVGDRL

SEQ ID NO: 6396 - DNA, 21 bp, synthetic construct
  misc_feature 1..21: note = n-mer motif encoding polynucleotide
  source 1..21: mol_type = other DNA
aatcatgttggtgatcgtttg

SEQ ID NO: 6397 - protein, 7 aa, synthetic construct
  REGION 1..7: note = n-mer motif
VESTAFT

SEQ ID NO: 6398 - DNA, 21 bp, synthetic construct
  misc_feature 1..21: note = n-mer motif encoding polynucleotide
  source 1..21: mol_type = other DNA
gttgagagtacggcttttacg

SEQ ID NO: 6399 - protein, 7 aa, synthetic construct
  REGION 1..7: note = n-mer motif
LVAGQAM

SEQ ID NO: 6400 - DNA, 21 bp, synthetic construct
  misc_feature 1..21: note = n-mer motif encoding polynucleotide
  source 1..21: mol_type = other DNA
ctggtggcggggcaggctatg

SEQ ID NO: 6401 - protein, 7 aa, synthetic construct
  REGION 1..7: note = n-mer motif
GLVRIQD

SEQ ID NO: 6402 - DNA, 21 bp, synthetic construct
  misc_feature 1..21: note = n-mer motif encoding polynucleotide
  source 1..21: mol_type = other DNA
ggactggttcggatccaagac

SEQ ID NO: 6403 - protein, 7 aa, synthetic construct
  REGION 1..7: note = n-mer motif
TNTDSSL

SEQ ID NO: 6404 - DNA, 21 bp, synthetic construct
  misc_feature 1..21: note = n-mer motif encoding polynucleotide
  source 1..21: mol_type = other DNA
acgaatacggattctagtctg

SEQ ID NO: 6405 - protein, 7 aa, synthetic construct
  REGION 1..7: note = n-mer motif
TGLQVST

SEQ ID NO: 6406 - DNA, 21 bp, synthetic construct
  misc_feature 1..21: note = n-mer motif encoding polynucleotide
  source 1..21: mol_type = other DNA
actgggctgcaggttagtact

SEQ ID NO: 6407 - protein, 7 aa, synthetic construct
  REGION 1..7: note = n-mer motif
AHGDKDL

SEQ ID NO: 6408 - DNA, 21 bp, synthetic construct
  misc_feature 1..21: note = n-mer motif encoding polynucleotide
  source 1..21: mol_type = other DNA
gcacacggcgacaaagacctt

SEQ ID NO: 6409 - protein, 7 aa, synthetic construct
  REGION 1..7: note = n-mer motif
SSANLSN

SEQ ID NO: 6410 - DNA, 21 bp, synthetic construct
  misc_feature 1..21: note = n-mer motif encoding polynucleotide
  source 1..21: mol_type = other DNA
tcgtccgccaacctttcgaac

SEQ ID NO: 6411 - protein, 7 aa, synthetic construct
  REGION 1..7: note = n-mer motif
EIAFTVP

SEQ ID NO: 6412 - DNA, 21 bp, synthetic construct
  misc_feature 1..21: note = n-mer motif encoding polynucleotide
  source 1..21: mol_type = other DNA
gaaatagcattcaccgtacct

SEQ ID NO: 6413 - protein, 7 aa, synthetic construct
  REGION 1..7: note = n-mer motif
SGEPLGL

SEQ ID NO: 6414 - DNA, 21 bp, synthetic construct
  misc_feature 1..21: note = n-mer motif encoding polynucleotide
  source 1..21: mol_type = other DNA
tctggggagccgcttgggctt

SEQ ID NO: 6415 - protein, 7 aa, synthetic construct
  REGION 1..7: note = n-mer motif
QNVGVTK

SEQ ID NO: 6416 - DNA, 21 bp, synthetic construct
  misc_feature 1..21: note = n-mer motif encoding polynucleotide
  source 1..21: mol_type = other DNA
caaaacgtaggagttacgaaa

SEQ ID NO: 6417 - protein, 7 aa, synthetic construct
  REGION 1..7: note = n-mer motif
LSNLSNG

SEQ ID NO: 6418 - DNA, 21 bp, synthetic construct
  misc_feature 1..21: note = n-mer motif encoding polynucleotide
  source 1..21: mol_type = other DNA
cttagtaatctgtcgaatggt

SEQ ID NO: 6419 - protein, 7 aa, synthetic construct
  REGION 1..7: note = n-mer motif
LSTGEEM

SEQ ID NO: 6420 - DNA, 21 bp, synthetic construct
  misc_feature 1..21: note = n-mer motif encoding polynucleotide
  source 1..21: mol_type = other DNA
ctttcgacgggtgaggagatg

SEQ ID NO: 6421 - protein, 7 aa, synthetic construct
  REGION 1..7: note = n-mer motif
EGGGAQR

SEQ ID NO: 6422 - DNA, 21 bp, synthetic construct
  misc_feature 1..21: note = n-mer motif encoding polynucleotide
  source 1..21: mol_type = other DNA
gaggggggtggggctcagagg

SEQ ID NO: 6423 - protein, 7 aa, synthetic construct
  REGION 1..7: note = n-mer motif
DVRGSVN

SEQ ID NO: 6424 - DNA, 21 bp, synthetic construct
  misc_feature 1..21: note = n-mer motif encoding polynucleotide
  source 1..21: mol_type = other DNA
gacgtccgggggtctgtcaac

SEQ ID NO: 6425 - protein, 7 aa, synthetic construct
  REGION 1..7: note = n-mer motif
LNGDTGY

SEQ ID NO: 6426 - DNA, 21 bp, synthetic construct
  misc_feature 1..21: note = n-mer motif encoding polynucleotide
  source 1..21: mol_type = other DNA
cttaatggtgatacggggtat

SEQ ID NO: 6427 - protein, 7 aa, synthetic construct
  REGION 1..7: note = n-mer motif
MGDNYDR

SEQ ID NO: 6428 - DNA, 21 bp, synthetic construct
  misc_feature 1..21: note = n-mer motif encoding polynucleotide
  source 1..21: mol_type = other DNA
atgggcgacaactacgaccgc

SEQ ID NO: 6429 - protein, 7 aa, synthetic construct
  REGION 1..7: note = n-mer motif
QLRPLQT

SEQ ID NO: 6430 - DNA, 21 bp, synthetic construct
  misc_feature 1..21: note = n-mer motif encoding polynucleotide
  source 1..21: mol_type = other DNA
caactgcgtcctttgcaaacg

SEQ ID NO: 6431 - protein, 7 aa, synthetic construct
  REGION 1..7: note = n-mer motif
AGVMNDL

SEQ ID NO: 6432 - DNA, 21 bp, synthetic construct
  misc_feature 1..21: note = n-mer motif encoding polynucleotide
  source 1..21: mol_type = other DNA
gccggtgttatgaacgacctt

SEQ ID NO: 6433 - protein, 7 aa, synthetic construct
  REGION 1..7: note = n-mer motif
LLENARV

SEQ ID NO: 6434 - DNA, 21 bp, synthetic construct
  misc_feature 1..21: note = n-mer motif encoding polynucleotide
  source 1..21: mol_type = other DNA
ctgctggagaatgcgagggtg

SEQ ID NO: 6435 - protein, 7 aa, synthetic construct
  REGION 1..7: note = n-mer motif
LVVDASR

SEQ ID NO: 6436 - DNA, 21 bp, synthetic construct
  misc_feature 1..21: note = n-mer motif encoding polynucleotide
  source 1..21: mol_type = other DNA
ttggtagtagacgcaagtcgc

SEQ ID NO: 6437 - protein, 7 aa, synthetic construct
  REGION 1..7: note = n-mer motif
LATHDAR

SEQ ID NO: 6438 - DNA, 21 bp, synthetic construct
  misc_feature 1..21: note = n-mer motif encoding polynucleotide
  source 1..21: mol_type = other DNA
ctcgcaacgcacgacgcacga

SEQ ID NO: 6439 - protein, 7 aa, synthetic construct
  REGION 1..7: note = n-mer motif
VRQLDSN

SEQ ID NO: 6440 - DNA, 21 bp, synthetic construct
  misc_feature 1..21: note = n-mer motif encoding polynucleotide
  source 1..21: mol_type = other DNA
gtaagacaacttgactctaac

SEQ ID NO: 6441 - protein, 7 aa, synthetic construct
  REGION 1..7: note = n-mer motif
QARDTKT

SEQ ID NO: 6442 - DNA, 21 bp, synthetic construct
  misc_feature 1..21: note = n-mer motif encoding polynucleotide
  source 1..21: mol_type = other DNA
caagctcgagacaccaaaaca

SEQ ID NO: 6443 - protein, 7 aa, synthetic construct
  REGION 1..7: note = n-mer motif
TGDREQN

SEQ ID NO: 6444 - DNA, 21 bp, synthetic construct
  misc_feature 1..21: note = n-mer motif encoding polynucleotide
  source 1..21: mol_type = other DNA
actggtgatcgggaacagaat

SEQ ID NO: 6445 - protein, 7 aa, synthetic construct
  REGION 1..7: note = n-mer motif
SGAAAAT

SEQ ID NO: 6446 - DNA, 21 bp, synthetic construct
  misc_feature 1..21: note = n-mer motif encoding polynucleotide
  source 1..21: mol_type = other DNA
agcggggccgcagccgccacc

SEQ ID NO: 6447 - protein, 7 aa, synthetic construct
  REGION 1..7: note = n-mer motif
GRKGEGP

SEQ ID NO: 6448 - DNA, 21 bp, synthetic construct
  misc_feature 1..21: note = n-mer motif encoding polynucleotide
  source 1..21: mol_type = other DNA
ggtaggaagggtgagggtccg

SEQ ID NO: 6449 - protein, 7 aa, synthetic construct
  REGION 1..7: note = n-mer motif
QNVGVTQ

SEQ ID NO: 6450 - DNA, 21 bp, synthetic construct
  misc_feature 1..21: note = n-mer motif encoding polynucleotide
  source 1..21: mol_type = other DNA
cagaatgtgggggtgactcag

SEQ ID NO: 6451 - protein, 7 aa, synthetic construct
  REGION 1..7: note = n-mer motif
DSAPAAR

SEQ ID NO: 6452 - DNA, 21 bp, synthetic construct
  misc_feature 1..21: note = n-mer motif encoding polynucleotide
  source 1..21: mol_type = other DNA
gattcggctccggcggctcgg

SEQ ID NO: 6453 - protein, 7 aa, synthetic construct
  REGION 1..7: note = n-mer motif
ANQNVII

SEQ ID NO: 6454 - DNA, 21 bp, synthetic construct
  misc_feature 1..21: note = n-mer motif encoding polynucleotide
  source 1..21: mol_type = other DNA
gcaaaccaaaacgtaataata

SEQ ID NO: 6455 - protein, 7 aa, synthetic construct
  REGION 1..7: note = n-mer motif
GAHIVSA

SEQ ID NO: 6456 - DNA, 21 bp, synthetic construct
  misc_feature 1..21: note = n-mer motif encoding polynucleotide
  source 1..21: mol_type = other DNA
ggggcgcacatagtctccgca

SEQ ID NO: 6457 - protein, 7 aa, synthetic construct
  REGION 1..7: note = n-mer motif
NSDLASP

SEQ ID NO: 6458 - DNA, 21 bp, synthetic construct
  misc_feature 1..21: note = n-mer motif encoding polynucleotide
  source 1..21: mol_type = other DNA
aatagtgatttggcgtctcct

SEQ ID NO: 6459 - protein, 7 aa, synthetic construct
  REGION 1..7: note = n-mer motif
AASMVVG

SEQ ID NO: 6460 - DNA, 21 bp, synthetic construct
  misc_feature 1..21: note = n-mer motif encoding polynucleotide
  source 1..21: mol_type = other DNA
gctgcgagtatggttgttggg

SEQ ID NO: 6461 - protein, 7 aa, synthetic construct
  REGION 1..7: note = n-mer motif
VVSEIPL

SEQ ID NO: 6462 - DNA, 21 bp, synthetic construct
  misc_feature 1..21: note = n-mer motif encoding polynucleotide
  source 1..21: mol_type = other DNA
gtcgttagcgaaatccccctc

SEQ ID NO: 6463 - protein, 7 aa, synthetic construct
  REGION 1..7: note = n-mer motif
QAESAAR

SEQ ID NO: 6464 - DNA, 21 bp, synthetic construct
  misc_feature 1..21: note = n-mer motif encoding polynucleotide
  source 1..21: mol_type = other DNA
caagcggaatcagcggctaga

SEQ ID NO: 6465 - protein, 7 aa, synthetic construct
  REGION 1..7: note = n-mer motif
LSKEHAH

SEQ ID NO: 6466 - DNA, 21 bp, synthetic construct
  misc_feature 1..21: note = n-mer motif encoding polynucleotide
  source 1..21: mol_type = other DNA
ttatcgaaagaacacgcccac

SEQ ID NO: 6467 - protein, 7 aa, synthetic construct
  REGION 1..7: note = n-mer motif
TNLADTA

SEQ ID NO: 6468 - DNA, 21 bp, synthetic construct
  misc_feature 1..21: note = n-mer motif encoding polynucleotide
  source 1..21: mol_type = other DNA
actaatctggctgatactgcg

SEQ ID NO: 6469 - protein, 7 aa, synthetic construct
  REGION 1..7: note = n-mer motif
ADREVRY

SEQ ID NO: 6470 - DNA, 21 bp, synthetic construct
  misc_feature 1..21: note = n-mer motif encoding polynucleotide
  source 1..21: mol_type = other DNA
gcggatcgggaggtgcgttat

SEQ ID NO: 6471 - protein, 7 aa, synthetic construct
  REGION 1..7: note = n-mer motif
NISVTPV

SEQ ID NO: 6472 - DNA, 21 bp, synthetic construct
  misc_feature 1..21: note = n-mer motif encoding polynucleotide
  source 1..21: mol_type = other DNA
aatattagtgttacgccggtt

SEQ ID NO: 6473 - protein, 7 aa, synthetic construct
  REGION 1..7: note = n-mer motif
PSRGNEG

SEQ ID NO: 6474 - DNA, 21 bp, synthetic construct
  misc_feature 1..21: note = n-mer motif encoding polynucleotide
  source 1..21: mol_type = other DNA
cccagtcgcgggaacgaaggc

SEQ ID NO: 6475 - protein, 7 aa, synthetic construct
  REGION 1..7: note = n-mer motif
MMLNQGS

SEQ ID NO: 6476 - DNA, 21 bp, synthetic construct
  misc_feature 1..21: note = n-mer motif encoding polynucleotide
  source 1..21: mol_type = other DNA
atgatgcttaaccaaggcagc

SEQ ID NO: 6477 - protein, 7 aa, synthetic construct
  REGION 1..7: note = n-mer motif
VHSQDVS

SEQ ID NO: 6478 - DNA, 21 bp, synthetic construct
  misc_feature 1..21: note = n-mer motif encoding polynucleotide
  source 1..21: mol_type = other DNA
gtgcattcgcaggatgtgtct

SEQ ID NO: 6479 - protein, 7 aa, synthetic construct
  REGION 1..7: note = n-mer motif
ANAEVQR

SEQ ID NO: 6480 - DNA, 21 bp, synthetic construct
  misc_feature 1..21: note = n-mer motif encoding polynucleotide
  source 1..21: mol_type = other DNA
gcgaatgcggaggttcagcgt

SEQ ID NO: 6481 - protein, 7 aa, synthetic construct
  REGION 1..7: note = n-mer motif
LGPGITL

SEQ ID NO: 6482 - DNA, 21 bp, synthetic construct
  misc_feature 1..21: note = n-mer motif encoding polynucleotide
  source 1..21: mol_type = other DNA
ttaggccccggtatcaccctc

SEQ ID NO: 6483 - protein, 7 aa, synthetic construct
  REGION 1..7: note = n-mer motif
NVAELVA

SEQ ID NO: 6484 - DNA, 21 bp, synthetic construct
  misc_feature 1..21: note = n-mer motif encoding polynucleotide
  source 1..21: mol_type = other DNA
aacgtcgcagaattggtggca

SEQ ID NO: 6485 - protein, 7 aa, synthetic construct
  REGION 1..7: note = n-mer motif
ILSGLTS

SEQ ID NO: 6486 - DNA, 21 bp, synthetic construct
  misc_feature 1..21: note = n-mer motif encoding polynucleotide
  source 1..21: mol_type = other DNA
attctgagtgggttgacttct

SEQ ID NO: 6487 - protein, 7 aa, synthetic construct
  REGION 1..7: note = n-mer motif
VNVSPTT

SEQ ID NO: 6488 - DNA, 21 bp, synthetic construct
  misc_feature 1..21: note = n-mer motif encoding polynucleotide
  source 1..21: mol_type = other DNA
gtgaatgttagtcctactact

SEQ ID NO: 6489 - protein, 7 aa, synthetic construct
  REGION 1..7: note = n-mer motif
GERDARI

SEQ ID NO: 6490 - DNA, 21 bp, synthetic construct
  misc_feature 1..21: note = n-mer motif encoding polynucleotide
  source 1..21: mol_type = other DNA
ggtgagagggatgctaggatt

SEQ ID NO: 6491 - protein, 7 aa, synthetic construct
  REGION 1..7: note = n-mer motif
IGMSAST

SEQ ID NO: 6492 - DNA, 21 bp, synthetic construct
  misc_feature 1..21: note = n-mer motif encoding polynucleotide
  source 1..21: mol_type = other DNA
ataggtatgagcgcgtccacc

SEQ ID NO: 6493 - protein, 7 aa, synthetic construct
  REGION 1..7: note = n-mer motif
LSRGEEK

SEQ ID NO: 6494 - DNA, 21 bp, synthetic construct
  misc_feature 1..21: note = n-mer motif encoding polynucleotide
  source 1..21: mol_type = other DNA
ctttcgaggggtgaggagaag

SEQ ID NO: 6495 - protein, 7 aa, synthetic construct
  REGION 1..7: note = n-mer motif
KNKGVDP

SEQ ID NO: 6496 - DNA, 21 bp, synthetic construct
  misc_feature 1..21: note = n-mer motif encoding polynucleotide
  source 1..21: mol_type = other DNA
aaaaacaaaggcgtcgaccca

SEQ ID NO: 6497 - protein, 7 aa, synthetic construct
  REGION 1..7: note = n-mer motif
HQDRTTL

SEQ ID NO: 6498 - DNA, 21 bp, synthetic construct
  misc_feature 1..21: note = n-mer motif encoding polynucleotide
  source 1..21: mol_type = other DNA
catcaggataggacgacgctt

SEQ ID NO: 6499 - protein, 7 aa, synthetic construct
  REGION 1..7: note = n-mer motif
RISTEGT

SEQ ID NO: 6500 - DNA, 21 bp, synthetic construct
  misc_feature 1..21: note = n-mer motif encoding polynucleotide
  source 1..21: mol_type = other DNA
cgcatcagcacagaaggcact

SEQ ID NO: 6501 - protein, 7 aa, synthetic construct
  REGION 1..7: note = n-mer motif
ALSGLAK

SEQ ID NO: 6502 - DNA, 21 bp, synthetic construct
  misc_feature 1..21: note = n-mer motif encoding polynucleotide
  source 1..21: mol_type = other DNA
gcactgtccggactcgcaaaa

SEQ ID NO: 6503 - protein, 7 aa, synthetic construct
  REGION 1..7: note = n-mer motif
IGASVKL

SEQ ID NO: 6504 - DNA, 21 bp, synthetic construct
  misc_feature 1..21: note = n-mer motif encoding polynucleotide
  source 1..21: mol_type = other DNA
atcggtgcatcggtaaaactg

SEQ ID NO: 6505 - protein, 7 aa, synthetic construct
  REGION 1..7: note = n-mer motif
ISLNAAE

SEQ ID NO: 6506 - DNA, 21 bp, synthetic construct
  misc_feature 1..21: note = n-mer motif encoding polynucleotide
  source 1..21: mol_type = other DNA
atttcgctgaatgcggcggag

SEQ ID NO: 6507 - protein, 7 aa, synthetic construct
  REGION 1..7: note = n-mer motif
SHGSDTK

SEQ ID NO: 6508 - DNA, 21 bp, synthetic construct
  misc_feature 1..21: note = n-mer motif encoding polynucleotide
  source 1..21: mol_type = other DNA
tcccacggaagtgacaccaaa

SEQ ID NO: 6509 - protein, 7 aa, synthetic construct
  REGION 1..7: note = n-mer motif
HGRDALV

SEQ ID NO: 6510 - DNA, 21 bp, synthetic construct
  misc_feature 1..21: note = n-mer motif encoding polynucleotide
  source 1..21: mol_type = other DNA
catgggcgggatgctcttgtg

SEQ ID NO: 6511 - protein, 7 aa, synthetic construct
  REGION 1..7: note = n-mer motif
GVAGTYL

SEQ ID NO: 6512 - DNA, 21 bp, synthetic construct
  misc_feature 1..21: note = n-mer motif encoding polynucleotide
  source 1..21: mol_type = other DNA
ggggtggctgggacgtatctg

SEQ ID NO: 6513 - protein, 7 aa, synthetic construct
  REGION 1..7: note = n-mer motif
STEGAAL

SEQ ID NO: 6514 - DNA, 21 bp, synthetic construct
  misc_feature 1..21: note = n-mer motif encoding polynucleotide
  source 1..21: mol_type = other DNA
agtacggagggggcggctctg

SEQ ID NO: 6515 - protein, 7 aa, synthetic construct
  REGION 1..7: note = n-mer motif
SVMGVVR

SEQ ID NO: 6516 - DNA, 21 bp, synthetic construct
  misc_feature 1..21: note = n-mer motif encoding polynucleotide
  source 1..21: mol_type = other DNA
tccgtcatgggagtagttcgt

SEQ ID NO: 6517 - protein, 7 aa, synthetic construct
  REGION 1..7: note = n-mer motif
SVVVTAR

SEQ ID NO: 6518 - DNA, 21 bp, synthetic construct
  misc_feature 1..21: note = n-mer motif encoding polynucleotide
  source 1..21: mol_type = other DNA
tcggtcgtcgtaacagctcgg

SEQ ID NO: 6519 - protein, 7 aa, synthetic construct
  REGION 1..7: note = n-mer motif
PLVGAPV

SEQ ID NO: 6520 - DNA, 21 bp, synthetic construct
  misc_feature 1..21: note = n-mer motif encoding polynucleotide
  source 1..21: mol_type = other DNA
ccgctggttggggctccggtt

SEQ ID NO: 6521 - protein, 7 aa, synthetic construct
  REGION 1..7: note = n-mer motif
MGGATNP

SEQ ID NO: 6522 - DNA, 21 bp, synthetic construct
  misc_feature 1..21: note = n-mer motif encoding polynucleotide
  source 1..21: mol_type = other DNA
atggggggggctactaatccg

SEQ ID NO: 6523 - protein, 7 aa, synthetic construct
  REGION 1..7: note = n-mer motif
NGPMEAV

SEQ ID NO: 6524 - DNA, 21 bp, synthetic construct
  misc_feature 1..21: note = n-mer motif encoding polynucleotide
  source 1..21: mol_type = other DNA
aacggaccaatggaagcagtc

SEQ ID NO: 6525 - protein, 7 aa, synthetic construct
  REGION 1..7: note = n-mer motif
QVTDTKT

SEQ ID NO: 6526 - DNA, 21 bp, synthetic construct
  misc_feature 1..21: note = n-mer motif encoding polynucleotide
  source 1..21: mol_type = other DNA
caggtgactgatactaagact

SEQ ID NO: 6527 - protein, 7 aa, synthetic construct
  REGION 1..7: note = n-mer motif
NSKDVQR

SEQ ID NO: 6528 - DNA, 21 bp, synthetic construct
  misc_feature 1..21: note = n-mer motif encoding polynucleotide
  source 1..21: mol_type = other DNA
aactccaaagacgtacaaaga

SEQ ID NO: 6529 - protein, 7 aa, synthetic construct
  REGION 1..7: note = n-mer motif
RTTEPRF

SEQ ID NO: 6530 - DNA, 21 bp, synthetic construct
  misc_feature 1..21: note = n-mer motif encoding polynucleotide
  source 1..21: mol_type = other DNA
cgtactacggagcctcgtttt

SEQ ID NO: 6531 - protein, 7 aa, synthetic construct
  REGION 1..7: note = n-mer motif
VVGLTAA

SEQ ID NO: 6532 - DNA, 21 bp, synthetic construct
  misc_feature 1..21: note = n-mer motif encoding polynucleotide
  source 1..21: mol_type = other DNA
gttgtcggcttaaccgcagcg

SEQ ID NO: 6533 - protein, 7 aa, synthetic construct
  REGION 1..7: note = n-mer motif
PGEHYQV

SEQ ID NO: 6534 - DNA, 21 bp, synthetic construct
  misc_feature 1..21: note = n-mer motif encoding polynucleotide
  source 1..21: mol_type = other DNA
cctggcgaacactaccaagtg

SEQ ID NO: 6535 - protein, 7 aa, synthetic construct
  REGION 1..7: note = n-mer motif
RAVENMG

SEQ ID NO: 6536 - DNA, 21 bp, synthetic construct
  misc_feature 1..21: note = n-mer motif encoding polynucleotide
  source 1..21: mol_type = other DNA
cgcgcagtagaaaacatgggc

SEQ ID NO: 6537 - protein, 7 aa, synthetic construct
  REGION 1..7: note = n-mer motif
RVMGEEV

SEQ ID NO: 6538 - DNA, 21 bp, synthetic construct
  misc_feature 1..21: note = n-mer motif encoding polynucleotide
  source 1..21: mol_type = other DNA
cgtgtgatgggggaggaggtt

SEQ ID NO: 6539 - protein, 7 aa, synthetic construct
  REGION 1..7: note = n-mer motif
KYSGAES

SEQ ID NO: 6540 - DNA, 21 bp, synthetic construct
  misc_feature 1..21: note = n-mer motif encoding polynucleotide
  source 1..21: mol_type = other DNA
aaatactctggcgcggaatct

SEQ ID NO: 6541 - protein, 7 aa, synthetic construct
  REGION 1..7: note = n-mer motif
MLVTETV

SEQ ID NO: 6542 - DNA, 21 bp, synthetic construct
  misc_feature 1..21: note = n-mer motif encoding polynucleotide
  source 1..21: mol_type = other DNA
atgttggtcactgaaacggta

SEQ ID NO: 6543 - protein, 7 aa, synthetic construct
  REGION 1..7: note = n-mer motif
VFVEKSA

SEQ ID NO: 6544 - DNA, 21 bp, synthetic construct
  misc_feature 1..21: note = n-mer motif encoding polynucleotide
  source 1..21: mol_type = other DNA
gtttttgttgagaagagtgcg

SEQ ID NO: 6545 - protein, 7 aa, synthetic construct
  REGION 1..7: note = n-mer motif
SVNQAVT

SEQ ID NO: 6546 - DNA, 21 bp, synthetic construct
  misc_feature 1..21: note = n-mer motif encoding polynucleotide
  source 1..21: mol_type = other DNA
tctgtgaatcaggcggttacg

SEQ ID NO: 6547 - protein, 7 aa, synthetic construct
  REGION 1..7: note = n-mer motif
GHSATAA

SEQ ID NO: 6548 - DNA, 21 bp, synthetic construct
  misc_feature 1..21: note = n-mer motif encoding polynucleotide
  source 1..21: mol_type = other DNA
ggacactccgctaccgccgca

SEQ ID NO: 6549 - protein, 7 aa, synthetic construct
  REGION 1..7: note = n-mer motif
HDTSASV

SEQ ID NO: 6550 - DNA, 21 bp, synthetic construct
  misc_feature 1..21: note = n-mer motif encoding polynucleotide
  source 1..21: mol_type = other DNA
catgatactagtgctagtgtt

SEQ ID NO: 6551 - protein, 7 aa, synthetic construct
  REGION 1..7: note = n-mer motif
SVDSGLI

SEQ ID NO: 6552 - DNA, 21 bp, synthetic construct
  misc_feature 1..21: note = n-mer motif encoding polynucleotide
  source 1..21: mol_type = other DNA
tccgtagactccggacttatc

SEQ ID NO: 6553 - protein, 7 aa, synthetic construct
  REGION 1..7: note = n-mer motif
VGKVMDV

SEQ ID NO: 6554 - DNA, 21 bp, synthetic construct
  misc_feature 1..21: note = n-mer motif encoding polynucleotide
  source 1..21: mol_type = other DNA
gtcggaaaagtcatggacgtc

SEQ ID NO: 6555 - protein, 7 aa, synthetic construct
  REGION 1..7: note = n-mer motif
AIVSIAK

SEQ ID NO: 6556 - DNA, 21 bp, synthetic construct
  misc_feature 1..21: note = n-mer motif encoding polynucleotide
  source 1..21: mol_type = other DNA
gccatcgtttcaatagcaaaa

SEQ ID NO: 6557 - protein, 7 aa, synthetic construct
  REGION 1..7: note = n-mer motif
PAEHYQA

SEQ ID NO: 6558 - DNA, 21 bp, synthetic construct
  misc_feature 1..21: note = n-mer motif encoding polynucleotide
  source 1..21: mol_type = other DNA
ccggctgagcattatcaggct

SEQ ID NO: 6559 - protein, 7 aa, synthetic construct
  REGION 1..7: note = n-mer motif
VSLTDGL

SEQ ID NO: 6560 - DNA, 21 bp, synthetic construct
  misc_feature 1..21: note = n-mer motif encoding polynucleotide
  source 1..21: mol_type = other DNA
gtgagtttgactgatgggctt

SEQ ID NO: 6561 - protein, 7 aa, synthetic construct
  REGION 1..7: note = n-mer motif
SVTDVNH

SEQ ID NO: 6562 - DNA, 21 bp, synthetic construct
  misc_feature 1..21: note = n-mer motif encoding polynucleotide
  source 1..21: mol_type = other DNA
tctgttactgatgttaatcat

SEQ ID NO: 6563 - protein, 7 aa, synthetic construct
  REGION 1..7: note = n-mer motif
GLNEHEA

SEQ ID NO: 6564 - DNA, 21 bp, synthetic construct
  misc_feature 1..21: note = n-mer motif encoding polynucleotide
  source 1..21: mol_type = other DNA
ggtctgaatgagcatgaggcg

SEQ ID NO: 6565 - protein, 7 aa, synthetic construct
  REGION 1..7: note = n-mer motif
ANVGRDD

SEQ ID NO: 6566 - DNA, 21 bp, synthetic construct
  misc_feature 1..21: note = n-mer motif encoding polynucleotide
  source 1..21: mol_type = other DNA
gcaaacgttggccgcgacgac

SEQ ID NO: 6567 - protein, 7 aa, synthetic construct
  REGION 1..7: note = n-mer motif
AGYSSLT

SEQ ID NO: 6568 - DNA, 21 bp, synthetic construct
  misc_feature 1..21: note = n-mer motif encoding polynucleotide
  source 1..21: mol_type = other DNA
gctggatactcgtcactcaca

SEQ ID NO: 6569 - protein, 7 aa, synthetic construct
  REGION 1..7: note = n-mer motif
QLQPQQT

SEQ ID NO: 6570 - DNA, 21 bp, synthetic construct
  misc_feature 1..21: note = n-mer motif encoding polynucleotide
  source 1..21: mol_type = other DNA
caactccaaccccaacaaacc

SEQ ID NO: 6571 - protein, 7 aa, synthetic construct
  REGION 1..7: note = n-mer motif
MRVTENQ

SEQ ID NO: 6572 - DNA, 21 bp, synthetic construct
  misc_feature 1..21: note = n-mer motif encoding polynucleotide
  source 1..21: mol_type = other DNA
atgagggtcactgaaaaccaa

SEQ ID NO: 6573 - protein, 7 aa, synthetic construct
  REGION 1..7: note = n-mer motif
ITEQTTI

SEQ ID NO: 6574 - DNA, 21 bp, synthetic construct
  misc_feature 1..21: note = n-mer motif encoding polynucleotide
  source 1..21: mol_type = other DNA
attactgagcagactactatt

SEQ ID NO: 6575 - protein, 7 aa, synthetic construct
  REGION 1..7: note = n-mer motif
VVDSDNL

SEQ ID NO: 6576 - DNA, 21 bp, synthetic construct
  misc_feature 1..21: note = n-mer motif encoding polynucleotide
  source 1..21: mol_type = other DNA
gttgttgattcggataatctg

SEQ ID NO: 6577 - protein, 7 aa, synthetic construct
  REGION 1..7: note = n-mer motif
FSTDTSS

SEQ ID NO: 6578 - DNA, 21 bp, synthetic construct
  misc_feature 1..21: note = n-mer motif encoding polynucleotide
  source 1..21: mol_type = other DNA
ttttcgacggatacgtcgtct

SEQ ID NO: 6579 - protein, 7 aa, synthetic construct
  REGION 1..7: note = n-mer motif
PSQGTLR

SEQ ID NO: 6580 - DNA, 21 bp, synthetic construct
  misc_feature 1..21: note = n-mer motif encoding polynucleotide
  source 1..21: mol_type = other DNA
ccttctcaggggacgcttcgg

SEQ ID NO: 6581 - protein, 7 aa, synthetic construct
  REGION 1..7: note = n-mer motif
PTQGTVR

SEQ ID NO: 6582 - DNA, 21 bp, synthetic construct
  misc_feature 1..21: note = n-mer motif encoding polynucleotide
  source 1..21: mol_type = other DNA
cccacacaaggcacagtccgt

SEQ ID NO: 6583 - protein, 7 aa, synthetic construct
  REGION 1..7: note = n-mer motif
TDALTTK

SEQ ID NO: 6584 - DNA, 21 bp, synthetic construct
  misc_feature 1..21: note = n-mer motif encoding polynucleotide
  source 1..21: mol_type = other DNA
actgatgcgcttacgactaag

SEQ ID NO: 6585 - protein, 7 aa, synthetic construct
  REGION 1..7: note = n-mer motif
TDAGDGK

SEQ ID NO: 6586 - DNA, 21 bp, synthetic construct
  misc_feature 1..21: note = n-mer motif encoding polynucleotide
  source 1..21: mol_type = other DNA
acagacgcgggggacggcaaa

SEQ ID NO: 6587 - protein, 7 aa, synthetic construct
  REGION 1..7: note = n-mer motif
MTGISIV

SEQ ID NO: 6588 - DNA, 21 bp, synthetic construct
  misc_feature 1..21: note = n-mer motif encoding polynucleotide
  source 1..21: mol_type = other DNA
atgacaggcatctctatcgta

SEQ ID NO: 6589 - protein, 7 aa, synthetic construct
  REGION 1..7: note = n-mer motif
NGYTEGR

SEQ ID NO: 6590 - DNA, 21 bp, synthetic construct
  misc_feature 1..21: note = n-mer motif encoding polynucleotide
  source 1..21: mol_type = other DNA
aatgggtatacggaggggcgt

SEQ ID NO: 6591 - protein, 7 aa, synthetic construct
  REGION 1..7: note = n-mer motif
PTQGTVR

SEQ ID NO: 6592 - DNA, 21 bp, synthetic construct
  misc_feature 1..21: note = n-mer motif encoding polynucleotide
  source 1..21: mol_type = other DNA
cctactcaggggacggttcgg

SEQ ID NO: 6593 - protein, 7 aa, synthetic construct
  REGION 1..7: note = n-mer motif
SLVTSST

SEQ ID NO: 6594 - DNA, 21 bp, synthetic construct
  misc_feature 1..21: note = n-mer motif encoding polynucleotide
  source 1..21: mol_type = other DNA
tcgcttgttacttctagtacg

SEQ ID NO: 6595 - protein, 7 aa, synthetic construct
  REGION 1..7: note = n-mer motif
PTQGTFR

SEQ ID NO: 6596 - DNA, 21 bp, synthetic construct
  misc_feature 1..21: note = n-mer motif encoding polynucleotide
  source 1..21: mol_type = other DNA
ccgacacaaggaacattcagg

SEQ ID NO: 6597 - protein, 7 aa, synthetic construct
  REGION 1..7: note = n-mer motif
PTQGTIR

SEQ ID NO: 6598 - DNA, 21 bp, synthetic construct
  misc_feature 1..21: note = n-mer motif encoding polynucleotide
  source 1..21: mol_type = other DNA
cctactcaggggacgattcgg

SEQ ID NO: 6599 - protein, 7 aa, synthetic construct
  REGION 1..7: note = n-mer motif
AIVSIAQ

SEQ ID NO: 6600 - DNA, 21 bp, synthetic construct
  misc_feature 1..21: note = n-mer motif encoding polynucleotide
  source 1..21: mol_type = other DNA
gcgattgtgtcgattgctcag

SEQ ID NO: 6601 - protein, 7 aa, synthetic construct
  REGION 1..7: note = n-mer motif
LTSGLAA

SEQ ID NO: 6602 - DNA, 21 bp, synthetic construct
  misc_feature 1..21: note = n-mer motif encoding polynucleotide
  source 1..21: mol_type = other DNA
ttgacgtctggtttggcggcg

SEQ ID NO: 6603 - protein, 7 aa, synthetic construct
  REGION 1..7: note = n-mer motif
PTQGTFR

SEQ ID NO: 6604 - DNA, 21 bp, synthetic construct
  misc_feature 1..21: note = n-mer motif encoding polynucleotide
  source 1..21: mol_type = other DNA
cctactcaggggacgtttcgg

SEQ ID NO: 6605 - protein, 7 aa, synthetic construct
  REGION 1..7: note = n-mer motif
STIPTMK

SEQ ID NO: 6606 - DNA, 21 bp, synthetic construct
  misc_feature 1..21: note = n-mer motif encoding polynucleotide
  source 1..21: mol_type = other DNA
agtactattcctactatgaag

SEQ ID NO: 6607 - protein, 7 aa, synthetic construct
  REGION 1..7: note = n-mer motif
GTVGSMV

SEQ ID NO: 6608 - DNA, 21 bp, synthetic construct
  misc_feature 1..21: note = n-mer motif encoding polynucleotide
  source 1..21: mol_type = other DNA
ggtacggtgggttctatggtt

SEQ ID NO: 6609 - protein, 7 aa, synthetic construct
  REGION 1..7: note = n-mer motif
ELMASTI

SEQ ID NO: 6610 - DNA, 21 bp, synthetic construct
  misc_feature 1..21: note = n-mer motif encoding polynucleotide
  source 1..21: mol_type = other DNA
gagcttatggcttctactatt

SEQ ID NO: 6611 - protein, 7 aa, synthetic construct
  REGION 1..7: note = n-mer motif
SPVGIIA

SEQ ID NO: 6612 - DNA, 21 bp, synthetic construct
  misc_feature 1..21: note = n-mer motif encoding polynucleotide
  source 1..21: mol_type = other DNA
tctcctgtgggtattattgcg

SEQ ID NO: 6613 - protein, 7 aa, synthetic construct
  REGION 1..7: note = n-mer motif
TSREEQW

SEQ ID NO: 6614 - DNA, 21 bp, synthetic construct
  misc_feature 1..21: note = n-mer motif encoding polynucleotide
  source 1..21: mol_type = other DNA
acttctcgtgaggagcagtgg

SEQ ID NO: 6615 - protein, 7 aa, synthetic construct
  REGION 1..7: note = n-mer motif
RASADVV

SEQ ID NO: 6616 - DNA, 21 bp, synthetic construct
  misc_feature 1..21: note = n-mer motif encoding polynucleotide
  source 1..21: mol_type = other DNA
agggcgagtgcggatgttgtg

SEQ ID NO: 6617 - protein, 7 aa, synthetic construct
  REGION 1..7: note = n-mer motif
RYNDEST

SEQ ID NO: 6618 - DNA, 21 bp, synthetic construct
  misc_feature 1..21: note = n-mer motif encoding polynucleotide
  source 1..21: mol_type = other DNA
agatacaacgacgaatccact

SEQ ID NO: 6619 - protein, 7 aa, synthetic construct
  REGION 1..7: note = n-mer motif
HTIAASM

SEQ ID NO: 6620 - DNA, 21 bp, synthetic construct
  misc_feature 1..21: note = n-mer motif encoding polynucleotide
  source 1..21: mol_type = other DNA
cacaccatagccgcaagtatg

SEQ ID NO: 6621 - protein, 7 aa, synthetic construct
  REGION 1..7: note = n-mer motif
HTQGTLR

SEQ ID NO: 6622 - DNA, 21 bp, synthetic construct
  misc_feature 1..21: note = n-mer motif encoding polynucleotide
  source 1..21: mol_type = other DNA
catactcaggggacgcttcgg

SEQ ID NO: 6623 - protein, 7 aa, synthetic construct
  REGION 1..7: note = n-mer motif
DGRAELR

SEQ ID NO: 6624 - DNA, 21 bp, synthetic construct
  misc_feature 1..21: note = n-mer motif encoding polynucleotide
  source 1..21: mol_type = other DNA
gatgggcgggcggagttgcgt

SEQ ID NO: 6625 - protein, 7 aa, synthetic construct
  REGION 1..7: note = n-mer motif
AADSSAR

SEQ ID NO: 6626 - DNA, 21 bp, synthetic construct
  misc_feature 1..21: note = n-mer motif encoding polynucleotide
  source 1..21: mol_type = other DNA
gccgctgactcatcggcccgt

SEQ ID NO: 6627 - protein, 7 aa, synthetic construct
  REGION 1..7: note = n-mer motif
NLGAALS

SEQ ID NO: 6628 - DNA, 21 bp, synthetic construct
  misc_feature 1..21: note = n-mer motif encoding polynucleotide
  source 1..21: mol_type = other DNA
aaccttggggctgccctatcg

SEQ ID NO: 6629 - protein, 7 aa, synthetic construct
  REGION 1..7: note = n-mer motif
ALNEHVA

SEQ ID NO: 6630 - DNA, 21 bp, synthetic construct
  misc_feature 1..21: note = n-mer motif encoding polynucleotide
  source 1..21: mol_type = other DNA
gctctgaatgagcatgtggcg

SEQ ID NO: 6631 - protein, 7 aa, synthetic construct
  REGION 1..7: note = n-mer motif
IMVDAHS

SEQ ID NO: 6632 - DNA, 21 bp, synthetic construct
  misc_feature 1..21: note = n-mer motif encoding polynucleotide
  source 1..21: mol_type = other DNA
attatggttgatgctcattcg

SEQ ID NO: 6633 - protein, 7 aa, synthetic construct
  REGION 1..7: note = n-mer motif
PAQGTLR

SEQ ID NO: 6634 - DNA, 21 bp, synthetic construct
  misc_feature 1..21: note = n-mer motif encoding polynucleotide
  source 1..21: mol_type = other DNA
ccggcgcaaggaacactacga

SEQ ID NO: 6635 - protein, 7 aa, synthetic construct
  REGION 1..7: note = n-mer motif
SIGDLGK

SEQ ID NO: 6636 - DNA, 21 bp, synthetic construct
  misc_feature 1..21: note = n-mer motif encoding polynucleotide
  source 1..21: mol_type = other DNA
agtatcggtgacctaggtaaa

SEQ ID NO: 6637 - protein, 7 aa, synthetic construct
  REGION 1..7: note = n-mer motif
PSQGTLR

SEQ ID NO: 6638 - DNA, 21 bp, synthetic construct
  misc_feature 1..21: note = n-mer motif encoding polynucleotide
  source 1..21: mol_type = other DNA
ccgtcccaaggaacactcagg

SEQ ID NO: 6639 - protein, 7 aa, synthetic construct
  REGION 1..7: note = n-mer motif
PTHGTLR

SEQ ID NO: 6640 - DNA, 21 bp, synthetic construct
  misc_feature 1..21: note = n-mer motif encoding polynucleotide
  source 1..21: mol_type = other DNA
ccgacccacggtacactgcga

SEQ ID NO: 6641 - protein, 7 aa, synthetic construct
  REGION 1..7: note = n-mer motif
NRELALG

SEQ ID NO: 6642 - DNA, 21 bp, synthetic construct
  misc_feature 1..21: note = n-mer motif encoding polynucleotide
  source 1..21: mol_type = other DNA
aaccgcgaactcgcactcggg

SEQ ID NO: 6643 - protein, 7 aa, synthetic construct
  REGION 1..7: note = n-mer motif
AGGGDPR

SEQ ID NO: 6644 - DNA, 21 bp, synthetic construct
  misc_feature 1..21: note = n-mer motif encoding polynucleotide
  source 1..21: mol_type = other DNA
gctggtggaggtgacccccga

SEQ ID NO: 6645 - protein, 7 aa, synthetic construct
  REGION 1..7: note = n-mer motif
PNERPTV

SEQ ID NO: 6646 - DNA, 21 bp, synthetic construct
  misc_feature 1..21: note = n-mer motif encoding polynucleotide
  source 1..21: mol_type = other DNA
cccaacgaacgtccaacggtc

SEQ ID NO: 6647 - protein, 7 aa, synthetic construct
  REGION 1..7: note = n-mer motif
AGVSASL

SEQ ID NO: 6648 - DNA, 21 bp, synthetic construct
  misc_feature 1..21: note = n-mer motif encoding polynucleotide
  source 1..21: mol_type = other DNA
gcgggtgtttctgcgtcgttg

SEQ ID NO: 6649 - protein, 7 aa, synthetic construct
  REGION 1..7: note = n-mer motif
VIAGVGI

SEQ ID NO: 6650 - DNA, 21 bp, synthetic construct
  misc_feature 1..21: note = n-mer motif encoding polynucleotide
  source 1..21: mol_type = other DNA
gtaatcgcgggagtaggcatc

SEQ ID NO: 6651 - protein, 7 aa, synthetic construct
  REGION 1..7: note = n-mer motif
AIQTNDA

SEQ ID NO: 6652 - DNA, 21 bp, synthetic construct
  misc_feature 1..21: note = n-mer motif encoding polynucleotide
  source 1..21: mol_type = other DNA
gcaatccaaaccaacgacgcg

SEQ ID NO: 6653 - protein, 7 aa, synthetic construct
  REGION 1..7: note = n-mer motif
RTMGDST

SEQ ID NO: 6654 - DNA, 21 bp, synthetic construct
  misc_feature 1..21: note = n-mer motif encoding polynucleotide
  source 1..21: mol_type = other DNA
cggacaatgggtgacagtacg

SEQ ID NO: 6655 - protein, 7 aa, synthetic construct
  REGION 1..7: note = n-mer motif
KNQDMQV

SEQ ID NO: 6656 - DNA, 21 bp, synthetic construct
  misc_feature 1..21: note = n-mer motif encoding polynucleotide
  source 1..21: mol_type = other DNA
aagaatcaggatatgcaggtg

SEQ ID NO: 6657 - protein, 7 aa, synthetic construct
  REGION 1..7: note = n-mer motif
NGNMATF

SEQ ID NO: 6658 - DNA, 21 bp, synthetic construct
  misc_feature 1..21: note = n-mer motif encoding polynucleotide
  source 1..21: mol_type = other DNA
aatgggaatatggcgactttt

SEQ ID NO: 6659 - protein, 7 aa, synthetic construct
  REGION 1..7: note = n-mer motif
MVTHTNK

SEQ ID NO: 6660 - DNA, 21 bp, synthetic construct
  misc_feature 1..21: note = n-mer motif encoding polynucleotide
  source 1..21: mol_type = other DNA
atggtaacacacacaaacaaa

SEQ ID NO: 6661 - protein, 7 aa, synthetic construct
  REGION 1..7: note = n-mer motif
SLLLTTP

SEQ ID NO: 6662 - DNA, 21 bp, synthetic construct
  misc_feature 1..21: note = n-mer motif encoding polynucleotide
  source 1..21: mol_type = other DNA
tcattactattgacgacaccc

SEQ ID NO: 6663 - protein, 7 aa, synthetic construct
  REGION 1..7: note = n-mer motif
SSVQGIL

SEQ ID NO: 6664 - DNA, 21 bp, synthetic construct
  misc_feature 1..21: note = n-mer motif encoding polynucleotide
  source 1..21: mol_type = other DNA
tcctcagtccaaggaatacta

SEQ ID NO: 6665 - protein, 7 aa, synthetic construct
  REGION 1..7: note = n-mer motif
RIVDSVP

SEQ ID NO: 6666 - DNA, 21 bp, synthetic construct
  misc_feature 1..21: note = n-mer motif encoding polynucleotide
  source 1..21: mol_type = other DNA
aggattgtggatagtgttccg

SEQ ID NO: 6667 - protein, 7 aa, synthetic construct
  REGION 1..7: note = n-mer motif
PTEGTLR

SEQ ID NO: 6668 - DNA, 21 bp, synthetic construct
  misc_feature 1..21: note = n-mer motif encoding polynucleotide
  source 1..21: mol_type = other DNA
ccgacagaaggcacactgcga

SEQ ID NO: 6669 - protein, 7 aa, synthetic construct
  REGION 1..7: note = n-mer motif
YLVTTEN

SEQ ID NO: 6670 - DNA, 21 bp, synthetic construct
  misc_feature 1..21: note = n-mer motif encoding polynucleotide
  source 1..21: mol_type = other DNA
tatttggttactactgagaat

SEQ ID NO: 6671 - protein, 7 aa, synthetic construct
  REGION 1..7: note = n-mer motif
PTQGTLR

SEQ ID NO: 6672 - DNA, 21 bp, synthetic construct
  misc_feature 1..21: note = n-mer motif encoding polynucleotide
  source 1..21: mol_type = other DNA
cctactcaggggacgcttcgg

SEQ ID NO: 6673 - protein, 7 aa, synthetic construct
  REGION 1..7: note = n-mer motif
LLAGADR

SEQ ID NO: 6674 - DNA, 21 bp, synthetic construct
  misc_feature 1..21: note = n-mer motif encoding polynucleotide
  source 1..21: mol_type = other DNA
ttgcttgctggtgctgatcgt

SEQ ID NO: 6675 - protein, 7 aa, synthetic construct
  REGION 1..7: note = n-mer motif
HSKGFDY

SEQ ID NO: 6676 - DNA, 21 bp, synthetic construct
  misc_feature 1..21: note = n-mer motif encoding polynucleotide
  source 1..21: mol_type = other DNA
cacagtaaaggtttcgactac

SEQ ID NO: 6677 - protein, 7 aa, synthetic construct
  REGION 1..7: note = n-mer motif
FQVEQVK

SEQ ID NO: 6678 - DNA, 21 bp, synthetic construct
  misc_feature 1..21: note = n-mer motif encoding polynucleotide
  source 1..21: mol_type = other DNA
tttcaggttgagcaggttaag

SEQ ID NO: 6679 - protein, 7 aa, synthetic construct
  REGION 1..7: note = n-mer motif
TGGRDQY

SEQ ID NO: 6680 - DNA, 21 bp, synthetic construct
  misc_feature 1..21: note = n-mer motif encoding polynucleotide
  source 1..21: mol_type = other DNA
actggtggtcgggatcagtat

SEQ ID NO: 6681 - protein, 7 aa, synthetic construct
  REGION 1..7: note = n-mer motif
PTPGTLR

SEQ ID NO: 6682 - DNA, 21 bp, synthetic construct
  misc_feature 1..21: note = n-mer motif encoding polynucleotide
  source 1..21: mol_type = other DNA
cctactccggggacgcttcgg

SEQ ID NO: 6683 - protein, 7 aa, synthetic construct
  REGION 1..7: note = n-mer motif
LGDSAEA

SEQ ID NO: 6684 - DNA, 21 bp, synthetic construct
  misc_feature 1..21: note = n-mer motif encoding polynucleotide
  source 1..21: mol_type = other DNA
cttggggattctgctgaggcg

SEQ ID NO: 6685 - protein, 7 aa, synthetic construct
  REGION 1..7: note = n-mer motif
RVDSEQH

SEQ ID NO: 6686 - DNA, 21 bp, synthetic construct
  misc_feature 1..21: note = n-mer motif encoding polynucleotide
  source 1..21: mol_type = other DNA
agggtggattcggagcagcat

SEQ ID NO: 6687 - protein, 7 aa, synthetic construct
  REGION 1..7: note = n-mer motif
SVDSGML

SEQ ID NO: 6688 - DNA, 21 bp, synthetic construct
  misc_feature 1..21: note = n-mer motif encoding polynucleotide
  source 1..21: mol_type = other DNA
agtgttgatagtgggatgctt

SEQ ID NO: 6689 - protein, 7 aa, synthetic construct
  REGION 1..7: note = n-mer motif
NTENASR

SEQ ID NO: 6690 - DNA, 21 bp, synthetic construct
  misc_feature 1..21: note = n-mer motif encoding polynucleotide
  source 1..21: mol_type = other DNA
aatactgagaatgcgtcgcgg

SEQ ID NO: 6691 - protein, 7 aa, synthetic construct
  REGION 1..7: note = n-mer motif
PTLGTLR

SEQ ID NO: 6692 - DNA, 21 bp, synthetic construct
  misc_feature 1..21: note = n-mer motif encoding polynucleotide
  source 1..21: mol_type = other DNA
cctactctggggacgcttcgg

SEQ ID NO: 6693 - protein, 7 aa, synthetic construct
  REGION 1..7: note = n-mer motif
RVALDLP

SEQ ID NO: 6694 - DNA, 21 bp, synthetic construct
  misc_feature 1..21: note = n-mer motif encoding polynucleotide
  source 1..21: mol_type = other DNA
agggtggcgctggatttgccg

SEQ ID NO: 6695 - protein, 7 aa, synthetic construct
  REGION 1..7: note = n-mer motif
AGDRDQY

SEQ ID NO: 6696 - DNA, 21 bp, synthetic construct
  misc_feature 1..21: note = n-mer motif encoding polynucleotide
  source 1..21: mol_type = other DNA
gctggtgatcgggatcagtat

SEQ ID NO: 6697 - protein, 7 aa, synthetic construct
  REGION 1..7: note = n-mer motif
VIALTEA

SEQ ID NO: 6698 - DNA, 21 bp, synthetic construct
  misc_feature 1..21: note = n-mer motif encoding polynucleotide
  source 1..21: mol_type = other DNA
gtgattgcgttgacggaggct

SEQ ID NO: 6699 - protein, 7 aa, synthetic construct
  REGION 1..7: note = n-mer motif
STIHTLK

SEQ ID NO: 6700 - DNA, 21 bp, synthetic construct
  misc_feature 1..21: note = n-mer motif encoding polynucleotide
  source 1..21: mol_type = other DNA
agtactattcatactctgaag

SEQ ID NO: 6701 - protein, 7 aa, synthetic construct
  REGION 1..7: note = n-mer motif
REALALT

SEQ ID NO: 6702 - DNA, 21 bp, synthetic construct
  misc_feature 1..21: note = n-mer motif encoding polynucleotide
  source 1..21: mol_type = other DNA
agggaggcgctggctctgacg

SEQ ID NO: 6703 - protein, 7 aa, synthetic construct
  REGION 1..7: note = n-mer motif
TTSGNLM

SEQ ID NO: 6704 - DNA, 21 bp, synthetic construct
  misc_feature 1..21: note = n-mer motif encoding polynucleotide
  source 1..21: mol_type = other DNA
acgacgtcggggaatcttatg

SEQ ID NO: 6705 - protein, 7 aa, synthetic construct
  REGION 1..7: note = n-mer motif
LTLSNGV

SEQ ID NO: 6706 - DNA, 21 bp, synthetic construct
  misc_feature 1..21: note = n-mer motif encoding polynucleotide
  source 1..21: mol_type = other DNA
cttacgctgagtaatggggtg

SEQ ID NO: 6707 - protein, 7 aa, synthetic construct
  REGION 1..7: note = n-mer motif
GVVNDER

SEQ ID NO: 6708 - DNA, 21 bp, synthetic construct
  misc_feature 1..21: note = n-mer motif encoding polynucleotide
  source 1..21: mol_type = other DNA
ggcgttgtcaacgacgaacgg

SEQ ID NO: 6709 - protein, 7 aa, synthetic construct
  REGION 1..7: note = n-mer motif
DKVVDEV

SEQ ID NO: 6710 - DNA, 21 bp, synthetic construct
  misc_feature 1..21: note = n-mer motif encoding polynucleotide
  source 1..21: mol_type = other DNA
gataaggtggttgatgaggtg

SEQ ID NO: 6711 - protein, 7 aa, synthetic construct
  REGION 1..7: note = n-mer motif
MAASVTL

SEQ ID NO: 6712 - DNA, 21 bp, synthetic construct
  misc_feature 1..21: note = n-mer motif encoding polynucleotide
  source 1..21: mol_type = other DNA
atggcggctagtgttacgctt

SEQ ID NO: 6713 - protein, 7 aa, synthetic construct
  REGION 1..7: note = n-mer motif
LTGERIL

SEQ ID NO: 6714 - DNA, 21 bp, synthetic construct
  misc_feature 1..21: note = n-mer motif encoding polynucleotide
  source 1..21: mol_type = other DNA
ctaaccggtgaacgcatactt

SEQ ID NO: 6715 - protein, 7 aa, synthetic construct
  REGION 1..7: note = n-mer motif
NTVVNDP

SEQ ID NO: 6716 - DNA, 21 bp, synthetic construct
  misc_feature 1..21: note = n-mer motif encoding polynucleotide
  source 1..21: mol_type = other DNA
aacacagtcgtgaacgaccct

SEQ ID NO: 6717 - protein, 7 aa, synthetic construct
  REGION 1..7: note = n-mer motif
VNAALGI

SEQ ID NO: 6718 - DNA, 21 bp, synthetic construct
  misc_feature 1..21: note = n-mer motif encoding polynucleotide
  source 1..21: mol_type = other DNA
gttaatgctgcgcttgggatt

SEQ ID NO: 6719 - protein, 7 aa, synthetic construct
  REGION 1..7: note = n-mer motif
SRELTGS

SEQ ID NO: 6720 - DNA, 21 bp, synthetic construct
  misc_feature 1..21: note = n-mer motif encoding polynucleotide
  source 1..21: mol_type = other DNA
tcgagggagttgactgggtcg

SEQ ID NO: 6721 - protein, 7 aa, synthetic construct
  REGION 1..7: note = n-mer motif
TVDSPMR

SEQ ID NO: 6722 - DNA, 21 bp, synthetic construct
  misc_feature 1..21: note = n-mer motif encoding polynucleotide
  source 1..21: mol_type = other DNA
accgtcgacagccctatgcga

SEQ ID NO: 6723 - protein, 7 aa, synthetic construct
  REGION 1..7: note = n-mer motif
ATDSSVR

SEQ ID NO: 6724 - DNA, 21 bp, synthetic construct
  misc_feature 1..21: note = n-mer motif encoding polynucleotide
  source 1..21: mol_type = other DNA
gccaccgacagcagtgtccgt

SEQ ID NO: 6725 - protein, 7 aa, synthetic construct
  REGION 1..7: note = n-mer motif
LESLSHH

SEQ ID NO: 6726 - DNA, 21 bp, synthetic construct
  misc_feature 1..21: note = n-mer motif encoding polynucleotide
  source 1..21: mol_type = other DNA
ctggagtcgctttctcatcat

SEQ ID NO: 6727 - protein, 7 aa, synthetic construct
  REGION 1..7: note = n-mer motif
ALGTQGS

SEQ ID NO: 6728 - DNA, 21 bp, synthetic construct
  misc_feature 1..21: note = n-mer motif encoding polynucleotide
  source 1..21: mol_type = other DNA
gctctgggtacgcagggttct

SEQ ID NO: 6729 - protein, 7 aa, synthetic construct
  REGION 1..7: note = n-mer motif
RTTPDVP

SEQ ID NO: 6730 - DNA, 21 bp, synthetic construct
  misc_feature 1..21: note = n-mer motif encoding polynucleotide
  source 1..21: mol_type = other DNA
cgtacgactcccgacgtacct

SEQ ID NO: 6731 - protein, 7 aa, synthetic construct
  REGION 1..7: note = n-mer motif
VLNDNLA

SEQ ID NO: 6732 - DNA, 21 bp, synthetic construct
  misc_feature 1..21: note = n-mer motif encoding polynucleotide
  source 1..21: mol_type = other DNA
gtgttaaacgacaacttagct

SEQ ID NO: 6733 - protein, 7 aa, synthetic construct
  REGION 1..7: note = n-mer motif
CNAAGCP

SEQ ID NO: 6734 - DNA, 21 bp, synthetic construct
  misc_feature 1..21: note = n-mer motif encoding polynucleotide
  source 1..21: mol_type = other DNA
tgtaatgctgcggggtgtccg

SEQ ID NO: 6735 - protein, 7 aa, synthetic construct
  REGION 1..7: note = n-mer motif
LHAGESR

SEQ ID NO: 6736 - DNA, 21 bp, synthetic construct
  misc_feature 1..21: note = n-mer motif encoding polynucleotide
  source 1..21: mol_type = other DNA
cttcatgctggtgagtctagg

SEQ ID NO: 6737 - protein, 7 aa, synthetic construct
  REGION 1..7: note = n-mer motif
HAGLGVT

SEQ ID NO: 6738 - DNA, 21 bp, synthetic construct
  misc_feature 1..21: note = n-mer motif encoding polynucleotide
  source 1..21: mol_type = other DNA
catgctggtcttggtgttact

SEQ ID NO: 6739 - protein, 7 aa, synthetic construct
  REGION 1..7: note = n-mer motif
KIGENAS

SEQ ID NO: 6740 - DNA, 21 bp, synthetic construct
  misc_feature 1..21: note = n-mer motif encoding polynucleotide
  source 1..21: mol_type = other DNA
aagattggtgagaatgcttct

SEQ ID NO: 6741 - protein, 7 aa, synthetic construct
  REGION 1..7: note = n-mer motif
NAHDTET

SEQ ID NO: 6742 - DNA, 21 bp, synthetic construct
  misc_feature 1..21: note = n-mer motif encoding polynucleotide
  source 1..21: mol_type = other DNA
aatgcgcatgatactgagact

SEQ ID NO: 6743 - protein, 7 aa, synthetic construct
  REGION 1..7: note = n-mer motif
TGLQDSN

SEQ ID NO: 6744 - DNA, 21 bp, synthetic construct
  misc_feature 1..21: note = n-mer motif encoding polynucleotide
  source 1..21: mol_type = other DNA
acaggattgcaagactcgaac

SEQ ID NO: 6745 - protein, 7 aa, synthetic construct
  REGION 1..7: note = n-mer motif
ASNPGRW

SEQ ID NO: 6746 - DNA, 21 bp, synthetic construct
  misc_feature 1..21: note = n-mer motif encoding polynucleotide
  source 1..21: mol_type = other DNA
gcgagtaaccctggaaggtgg

SEQ ID NO: 6747 - protein, 7 aa, synthetic construct
  REGION 1..7: note = n-mer motif
VVGTQDR

SEQ ID NO: 6748 - DNA, 21 bp, synthetic construct
  misc_feature 1..21: note = n-mer motif encoding polynucleotide
  source 1..21: mol_type = other DNA
gttgtggggactcaggatagg

SEQ ID NO: 6749 - protein, 7 aa, synthetic construct
  REGION 1..7: note = n-mer motif
VHASSPT

SEQ ID NO: 6750 - DNA, 21 bp, synthetic construct
  misc_feature 1..21: note = n-mer motif encoding polynucleotide
  source 1..21: mol_type = other DNA
gtgcatgcttctagtccgact

SEQ ID NO: 6751 - protein, 7 aa, synthetic construct
  REGION 1..7: note = n-mer motif
NGLQVSI

SEQ ID NO: 6752 - DNA, 21 bp, synthetic construct
  misc_feature 1..21: note = n-mer motif encoding polynucleotide
  source 1..21: mol_type = other DNA
aatgggctgcaggttagtatt

SEQ ID NO: 6753 - protein, 7 aa, synthetic construct
  REGION 1..7: note = n-mer motif
TVPNTDL

SEQ ID NO: 6754 - DNA, 21 bp, synthetic construct
  misc_feature 1..21: note = n-mer motif encoding polynucleotide
  source 1..21: mol_type = other DNA
actgtgcctaatactgatttg

SEQ ID NO: 6755 - protein, 7 aa, synthetic construct
  REGION 1..7: note = n-mer motif
FLLGHTD

SEQ ID NO: 6756 - DNA, 21 bp, synthetic construct
  misc_feature 1..21: note = n-mer motif encoding polynucleotide
  source 1..21: mol_type = other DNA
ttccttctggggcacacggac

SEQ ID NO: 6757 - protein, 7 aa, synthetic construct
  REGION 1..7: note = n-mer motif
REISILS

SEQ ID NO: 6758 - DNA, 21 bp, synthetic construct
  misc_feature 1..21: note = n-mer motif encoding polynucleotide
  source 1..21: mol_type = other DNA
cgcgaaatatcgatactatct

SEQ ID NO: 6759 - protein, 7 aa, synthetic construct
  REGION 1..7: note = n-mer motif
DSLLPQT

SEQ ID NO: 6760 - DNA, 21 bp, synthetic construct
  misc_feature 1..21: note = n-mer motif encoding polynucleotide
  source 1..21: mol_type = other DNA
gattctctgcttcctcagact

SEQ ID NO: 6761 - protein, 7 aa, synthetic construct
  REGION 1..7: note = n-mer motif
RGGVTTE

SEQ ID NO: 6762 - DNA, 21 bp, synthetic construct
  misc_feature 1..21: note = n-mer motif encoding polynucleotide
  source 1..21: mol_type = other DNA
cgtggaggcgtaaccaccgaa

SEQ ID NO: 6763 - protein, 7 aa, synthetic construct
  REGION 1..7: note = n-mer motif
HVASAGA

SEQ ID NO: 6764 - DNA, 21 bp, synthetic construct
  misc_feature 1..21: note = n-mer motif encoding polynucleotide
  source 1..21: mol_type = other DNA
catgttgcttcggcgggggcg

SEQ ID NO: 6765 - protein, 7 aa, synthetic construct
  REGION 1..7: note = n-mer motif
FGGVINA

SEQ ID NO: 6766 - DNA, 21 bp, synthetic construct
  misc_feature 1..21: note = n-mer motif encoding polynucleotide
  source 1..21: mol_type = other DNA
ttcgggggagtaataaacgct

SEQ ID NO: 6767 - protein, 7 aa, synthetic construct
  REGION 1..7: note = n-mer motif
NGMGDVT

SEQ ID NO: 6768 - DNA, 21 bp, synthetic construct
  misc_feature 1..21: note = n-mer motif encoding polynucleotide
  source 1..21: mol_type = other DNA
aacggcatgggggacgttact

SEQ ID NO: 6769 - protein, 7 aa, synthetic construct
  REGION 1..7: note = n-mer motif
TTVEVSG

SEQ ID NO: 6770 - DNA, 21 bp, synthetic construct
  misc_feature 1..21: note = n-mer motif encoding polynucleotide
  source 1..21: mol_type = other DNA
acaaccgtagaagtaagcggc

SEQ ID NO: 6771 - protein, 7 aa, synthetic construct
  REGION 1..7: note = n-mer motif
VGGNVVH

SEQ ID NO: 6772 - DNA, 21 bp, synthetic construct
  misc_feature 1..21: note = n-mer motif encoding polynucleotide
  source 1..21: mol_type = other DNA
gttggtggtaatgttgttcat

SEQ ID NO: 6773 - protein, 7 aa, synthetic construct
  REGION 1..7: note = n-mer motif
PMRPGVA

SEQ ID NO: 6774 - DNA, 21 bp, synthetic construct
  misc_feature 1..21: note = n-mer motif encoding polynucleotide
  source 1..21: mol_type = other DNA
ccgatgcggccgggtgtggct

SEQ ID NO: 6775 - protein, 7 aa, synthetic construct
  REGION 1..7: note = n-mer motif
RESGEQA

SEQ ID NO: 6776 - DNA, 21 bp, synthetic construct
  misc_feature 1..21: note = n-mer motif encoding polynucleotide
  source 1..21: mol_type = other DNA
agggagagtggggagcaggct

SEQ ID NO: 6777 - protein, 7 aa, synthetic construct
  REGION 1..7: note = n-mer motif
LSLTEGV

SEQ ID NO: 6778 - DNA, 21 bp, synthetic construct
  misc_feature 1..21: note = n-mer motif encoding polynucleotide
  source 1..21: mol_type = other DNA
ctgagtttgactgagggggtt

SEQ ID NO: 6779 - protein, 7 aa, synthetic construct
  REGION 1..7: note = n-mer motif
PKPSHGE

SEQ ID NO: 6780 - DNA, 21 bp, synthetic construct
  misc_feature 1..21: note = n-mer motif encoding polynucleotide
  source 1..21: mol_type = other DNA
cctaaaccatctcacggagaa

SEQ ID NO: 6781 - protein, 7 aa, synthetic construct
  REGION 1..7: note = n-mer motif
YQRTESL

SEQ ID NO: 6782 - DNA, 21 bp, synthetic construct
  misc_feature 1..21: note = n-mer motif encoding polynucleotide
  source 1..21: mol_type = other DNA
tatcagaggacggagtctctg

SEQ ID NO: 6783 - protein, 7 aa, synthetic construct
  REGION 1..7: note = n-mer motif
PGEHYRL

SEQ ID NO: 6784 - DNA, 21 bp, synthetic construct
  misc_feature 1..21: note = n-mer motif encoding polynucleotide
  source 1..21: mol_type = other DNA
cctggagaacactacagattg

SEQ ID NO: 6785 - protein, 7 aa, synthetic construct
  REGION 1..7: note = n-mer motif
TSVESNL

SEQ ID NO: 6786 - DNA, 21 bp, synthetic construct
  misc_feature 1..21: note = n-mer motif encoding polynucleotide
  source 1..21: mol_type = other DNA
acgtcggtggagtcgaatctt

SEQ ID NO: 6787 - protein, 7 aa, synthetic construct
  REGION 1..7: note = n-mer motif
GSGAGLH

SEQ ID NO: 6788 - DNA, 21 bp, synthetic construct
  misc_feature 1..21: note = n-mer motif encoding polynucleotide
  source 1..21: mol_type = other DNA
ggaagtggagctggccttcac

SEQ ID NO: 6789 - protein, 7 aa, synthetic construct
  REGION 1..7: note = n-mer motif
MAGGTNP

SEQ ID NO: 6790 - DNA, 21 bp, synthetic construct
  misc_feature 1..21: note = n-mer motif encoding polynucleotide
  source 1..21: mol_type = other DNA
atggcaggtggcacaaaccct

SEQ ID NO: 6791 - protein, 7 aa, synthetic construct
  REGION 1..7: note = n-mer motif
RESLEAL

SEQ ID NO: 6792 - DNA, 21 bp, synthetic construct
  misc_feature 1..21: note = n-mer motif encoding polynucleotide
  source 1..21: mol_type = other DNA
agggagagtcttgaggcgttg

SEQ ID NO: 6793 - protein, 7 aa, synthetic construct
  REGION 1..7: note = n-mer motif
KGYDTPM

SEQ ID NO: 6794 - DNA, 21 bp, synthetic construct
  misc_feature 1..21: note = n-mer motif encoding polynucleotide
  source 1..21: mol_type = other DNA
aaaggctacgacacacccatg

SEQ ID NO: 6795 - protein, 7 aa, synthetic construct
  REGION 1..7: note = n-mer motif
DQLNDGR

SEQ ID NO: 6796 - DNA, 21 bp, synthetic construct
  misc_feature 1..21: note = n-mer motif encoding polynucleotide
  source 1..21: mol_type = other DNA
gatcagctgaatgatgggcgg

SEQ ID NO: 6797 - protein, 7 aa, synthetic construct
  REGION 1..7: note = n-mer motif
TIGVVAN

SEQ ID NO: 6798 - DNA, 21 bp, synthetic construct
  misc_feature 1..21: note = n-mer motif encoding polynucleotide
  source 1..21: mol_type = other DNA
acgattggggttgtggcgaat

SEQ ID NO: 6799 - protein, 7 aa, synthetic construct
  REGION 1..7: note = n-mer motif
LSTGSQL

SEQ ID NO: 6800 - DNA, 21 bp, synthetic construct
  misc_feature 1..21: note = n-mer motif encoding polynucleotide
  source 1..21: mol_type = other DNA
ctgtctacggggtcgcagctg

SEQ ID NO: 6801 - protein, 7 aa, synthetic construct
  REGION 1..7: note = n-mer motif
VPGSTTT

SEQ ID NO: 6802 - DNA, 21 bp, synthetic construct
  misc_feature 1..21: note = n-mer motif encoding polynucleotide
  source 1..21: mol_type = other DNA
gttccaggctcaacgactacc

SEQ ID NO: 6803 - protein, 7 aa, synthetic construct
  REGION 1..7: note = n-mer motif
MGDAGLR

SEQ ID NO: 6804 - DNA, 21 bp, synthetic construct
  misc_feature 1..21: note = n-mer motif encoding polynucleotide
  source 1..21: mol_type = other DNA
atgggggatgcggggctgcgg

SEQ ID NO: 6805 - protein, 7 aa, synthetic construct
  REGION 1..7: note = n-mer motif
SPTSSPH

SEQ ID NO: 6806 - DNA, 21 bp, synthetic construct
  misc_feature 1..21: note = n-mer motif encoding polynucleotide
  source 1..21: mol_type = other DNA
tcacctacatcctcaccacac

SEQ ID NO: 6807 - protein, 7 aa, synthetic construct
  REGION 1..7: note = n-mer motif
ESLAGVR

SEQ ID NO: 6808 - DNA, 21 bp, synthetic construct
  misc_feature 1..21: note = n-mer motif encoding polynucleotide
  source 1..21: mol_type = other DNA
gaatcgttggcaggggtgcgt

SEQ ID NO: 6809 - protein, 7 aa, synthetic construct
  REGION 1..7: note = n-mer motif
KLAEGVR

SEQ ID NO: 6810 - DNA, 21 bp, synthetic construct
  misc_feature 1..21: note = n-mer motif encoding polynucleotide
  source 1..21: mol_type = other DNA
aaactagccgaaggagtgcgg

SEQ ID NO: 6811 - protein, 7 aa, synthetic construct
  REGION 1..7: note = n-mer motif
GNSGDHF

SEQ ID NO: 6812 - DNA, 21 bp, synthetic construct
  misc_feature 1..21: note = n-mer motif encoding polynucleotide
  source 1..21: mol_type = other DNA
ggtaactctggtgaccacttc

SEQ ID NO: 6813 - protein, 7 aa, synthetic construct
  REGION 1..7: note = n-mer motif
AVITEPK

SEQ ID NO: 6814 - DNA, 21 bp, synthetic construct
  misc_feature 1..21: note = n-mer motif encoding polynucleotide
  source 1..21: mol_type = other DNA
gcggtgattactgagcctaag

SEQ ID NO: 6815 - protein, 7 aa, synthetic construct
  REGION 1..7: note = n-mer motif
APTATLR

SEQ ID NO: 6816 - DNA, 21 bp, synthetic construct
  misc_feature 1..21: note = n-mer motif encoding polynucleotide
  source 1..21: mol_type = other DNA
gcgcctactgctactcttcgg

SEQ ID NO: 6817 - protein, 7 aa, synthetic construct
  REGION 1..7: note = n-mer motif
STFSTVM

SEQ ID NO: 6818 - DNA, 21 bp, synthetic construct
  misc_feature 1..21: note = n-mer motif encoding polynucleotide
  source 1..21: mol_type = other DNA
agcacattctccactgttatg

SEQ ID NO: 6819 - protein, 7 aa, synthetic construct
  REGION 1..7: note = n-mer motif
VLASLGD

SEQ ID NO: 6820 - DNA, 21 bp, synthetic construct
  misc_feature 1..21: note = n-mer motif encoding polynucleotide
  source 1..21: mol_type = other DNA
gtactcgcgtcgttgggcgac

SEQ ID NO: 6821 - protein, 7 aa, synthetic construct
  REGION 1..7: note = n-mer motif
AAGVIPN

SEQ ID NO: 6822 - DNA, 21 bp, synthetic construct
  misc_feature 1..21: note = n-mer motif encoding polynucleotide
  source 1..21: mol_type = other DNA
gccgccggagtgatacctaac

SEQ ID NO: 6823 - protein, 7 aa, synthetic construct
  REGION 1..7: note = n-mer motif
PGEPLRL

SEQ ID NO: 6824 - DNA, 21 bp, synthetic construct
  misc_feature 1..21: note = n-mer motif encoding polynucleotide
  source 1..21: mol_type = other DNA
ccgggagaacccttgcgactc

SEQ ID NO: 6825 - protein, 7 aa, synthetic construct
  REGION 1..7: note = n-mer motif
VTSDAGW

SEQ ID NO: 6826 - DNA, 21 bp, synthetic construct
  misc_feature 1..21: note = n-mer motif encoding polynucleotide
  source 1..21: mol_type = other DNA
gtcacctctgacgcagggtgg

SEQ ID NO: 6827 - protein, 7 aa, synthetic construct
  REGION 1..7: note = n-mer motif
STLISET

SEQ ID NO: 6828 - DNA, 21 bp, synthetic construct
  misc_feature 1..21: note = n-mer motif encoding polynucleotide
  source 1..21: mol_type = other DNA
tccacgttgatatcagaaacc

SEQ ID NO: 6829 - protein, 7 aa, synthetic construct
  REGION 1..7: note = n-mer motif
VGGAGEI

SEQ ID NO: 6830 - DNA, 21 bp, synthetic construct
  misc_feature 1..21: note = n-mer motif encoding polynucleotide
  source 1..21: mol_type = other DNA
gttggtggggcgggtgagatt

SEQ ID NO: 6831 - protein, 7 aa, synthetic construct
  REGION 1..7: note = n-mer motif
KTAQVQP

SEQ ID NO: 6832 - DNA, 21 bp, synthetic construct
  misc_feature 1..21: note = n-mer motif encoding polynucleotide
  source 1..21: mol_type = other DNA
aagacggcgcaggtgcagccg

SEQ ID NO: 6833 - protein, 7 aa, synthetic construct
  REGION 1..7: note = n-mer motif
SMNGTSL

SEQ ID NO: 6834 - DNA, 21 bp, synthetic construct
  misc_feature 1..21: note = n-mer motif encoding polynucleotide
  source 1..21: mol_type = other DNA
agtatgaatgggactagtctt

SEQ ID NO: 6835 - protein, 7 aa, synthetic construct
  REGION 1..7: note = n-mer motif
MVGLMGA

SEQ ID NO: 6836 - DNA, 21 bp, synthetic construct
  misc_feature 1..21: note = n-mer motif encoding polynucleotide
  source 1..21: mol_type = other DNA
atggtgggtctgatgggggct

SEQ ID NO: 6837 - protein, 7 aa, synthetic construct
  REGION 1..7: note = n-mer motif
LNVVDLQ

SEQ ID NO: 6838 - DNA, 21 bp, synthetic construct
  misc_feature 1..21: note = n-mer motif encoding polynucleotide
  source 1..21: mol_type = other DNA
ttgaacgttgtggacttgcaa

SEQ ID NO: 6839 - protein, 7 aa, synthetic construct
  REGION 1..7: note = n-mer motif
SVVSGLL

SEQ ID NO: 6840 - DNA, 21 bp, synthetic construct
  misc_feature 1..21: note = n-mer motif encoding polynucleotide
  source 1..21: mol_type = other DNA
tctgtggtgtcaggtcttttg

SEQ ID NO: 6841 - protein, 7 aa, synthetic construct
  REGION 1..7: note = n-mer motif
MAGGVQV

SEQ ID NO: 6842 - DNA, 21 bp, synthetic construct
  misc_feature 1..21: note = n-mer motif encoding polynucleotide
  source 1..21: mol_type = other DNA
atggcgggtggggtgcaggtt

SEQ ID NO: 6843 - protein, 7 aa, synthetic construct
  REGION 1..7: note = n-mer motif
SVTERSG

SEQ ID NO: 6844 - DNA, 21 bp, synthetic construct
  misc_feature 1..21: note = n-mer motif encoding polynucleotide
  source 1..21: mol_type = other DNA
tctgtgacggagaggagtggt

SEQ ID NO: 6845 - protein, 7 aa, synthetic construct
  REGION 1..7: note = n-mer motif
PNQGTLR

SEQ ID NO: 6846 - DNA, 21 bp, synthetic construct
  misc_feature 1..21: note = n-mer motif encoding polynucleotide
  source 1..21: mol_type = other DNA
ccaaaccaaggtactctacga

SEQ ID NO: 6847 - protein, 7 aa, synthetic construct
  REGION 1..7: note = n-mer motif
GLNEHEA

SEQ ID NO: 6848 - DNA, 21 bp, synthetic construct
  misc_feature 1..21: note = n-mer motif encoding polynucleotide
  source 1..21: mol_type = other DNA
ggtctgaatgagcatgaggcg

SEQ ID NO: 6849 - protein, 7 aa, synthetic construct
  REGION 1..7: note = n-mer motif
RVENGGT

SEQ ID NO: 6850 - DNA, 21 bp, synthetic construct
  misc_feature 1..21: note = n-mer motif encoding polynucleotide
  source 1..21: mol_type = other DNA
cgagtggaaaacggcgggacc

SEQ ID NO: 6851 - protein, 7 aa, synthetic construct
  REGION 1..7: note = n-mer motif
VSLTDGL

SEQ ID NO: 6852 - DNA, 21 bp, synthetic construct
  misc_feature 1..21: note = n-mer motif encoding polynucleotide
  source 1..21: mol_type = other DNA
gtgagtttgactgatgggctt

SEQ ID NO: 6853 - protein, 7 aa, synthetic construct
  REGION 1..7: note = n-mer motif
SRLENIS

SEQ ID NO: 6854 - DNA, 21 bp, synthetic construct
  misc_feature 1..21: note = n-mer motif encoding polynucleotide
  source 1..21: mol_type = other DNA
tcgcgtcttgaaaacatctcc

SEQ ID NO: 6855 - protein, 7 aa, synthetic construct
  REGION 1..7: note = n-mer motif
SVVPNVQ

SEQ ID NO: 6856 - DNA, 21 bp, synthetic construct
  misc_feature 1..21: note = n-mer motif encoding polynucleotide
  source 1..21: mol_type = other DNA
tcggtggtgccgaatgtgcag

SEQ ID NO: 6857 - protein, 7 aa, synthetic construct
  REGION 1..7: note = n-mer motif
TSMGIMV

SEQ ID NO: 6858 - DNA, 21 bp, synthetic construct
  misc_feature 1..21: note = n-mer motif encoding polynucleotide
  source 1..21: mol_type = other DNA
acgagtatgggtattatggtg

SEQ ID NO: 6859 - protein, 7 aa, synthetic construct
  REGION 1..7: note = n-mer motif
TGLGDRA

SEQ ID NO: 6860 - DNA, 21 bp, synthetic construct
  misc_feature 1..21: note = n-mer motif encoding polynucleotide
  source 1..21: mol_type = other DNA
accggcttgggagacagggct

SEQ ID NO: 6861 - protein, 7 aa, synthetic construct
  REGION 1..7: note = n-mer motif
VGSVTDS

SEQ ID NO: 6862 - DNA, 21 bp, synthetic construct
  misc_feature 1..21: note = n-mer motif encoding polynucleotide
  source 1..21: mol_type = other DNA
gttggtagcgtaaccgactcc

SEQ ID NO: 6863 - protein, 7 aa, synthetic construct
  REGION 1..7: note = n-mer motif
RTDGADH

SEQ ID NO: 6864 - DNA, 21 bp, synthetic construct
  misc_feature 1..21: note = n-mer motif encoding polynucleotide
  source 1..21: mol_type = other DNA
cgcacagacggagcagaccac

SEQ ID NO: 6865 - protein, 7 aa, synthetic construct
  REGION 1..7: note = n-mer motif
MSISEPR

SEQ ID NO: 6866 - DNA, 21 bp, synthetic construct
  misc_feature 1..21: note = n-mer motif encoding polynucleotide
  source 1..21: mol_type = other DNA
atgtctattagtgagccgcgg

SEQ ID NO: 6867 - protein, 7 aa, synthetic construct
  REGION 1..7: note = n-mer motif
MGGVTNP

SEQ ID NO: 6868 - DNA, 21 bp, synthetic construct
  misc_feature 1..21: note = n-mer motif encoding polynucleotide
  source 1..21: mol_type = other DNA
atgggaggtgtcaccaacccc

SEQ ID NO: 6869 - protein, 7 aa, synthetic construct
  REGION 1..7: note = n-mer motif
PSRGNEG

SEQ ID NO: 6870 - DNA, 21 bp, synthetic construct
  misc_feature 1..21: note = n-mer motif encoding polynucleotide
  source 1..21: mol_type = other DNA
cccagtcgcgggaacgaaggc

SEQ ID NO: 6871 - protein, 7 aa, synthetic construct
  REGION 1..7: note = n-mer motif
SAGGSLQ

SEQ ID NO: 6872 - DNA, 21 bp, synthetic construct
  misc_feature 1..21: note = n-mer motif encoding polynucleotide
  source 1..21: mol_type = other DNA
agtgctggtgggagtcttcag

SEQ ID NO: 6873 - protein, 7 aa, synthetic construct
  REGION 1..7: note = n-mer motif
GPRNSID

SEQ ID NO: 6874 - DNA, 21 bp, synthetic construct
  misc_feature 1..21: note = n-mer motif encoding polynucleotide
  source 1..21: mol_type = other DNA
ggcccacgtaactctatcgac

SEQ ID NO: 6875 - protein, 7 aa, synthetic construct
  REGION 1..7: note = n-mer motif
VLSGEEL

SEQ ID NO: 6876 - DNA, 21 bp, synthetic construct
  misc_feature 1..21: note = n-mer motif encoding polynucleotide
  source 1..21: mol_type = other DNA
gttcttagtggggaggagttg

SEQ ID NO: 6877 - protein, 7 aa, synthetic construct
  REGION 1..7: note = n-mer motif
TRTEDYT

SEQ ID NO: 6878 - DNA, 21 bp, synthetic construct
  misc_feature 1..21: note = n-mer motif encoding polynucleotide
  source 1..21: mol_type = other DNA
acgcgtacggaggattatact

SEQ ID NO: 6879 - protein, 7 aa, synthetic construct
  REGION 1..7: note = n-mer motif
VTGHPTL

SEQ ID NO: 6880 - DNA, 21 bp, synthetic construct
  misc_feature 1..21: note = n-mer motif encoding polynucleotide
  source 1..21: mol_type = other DNA
gttacgggtcatccgactctt

SEQ ID NO: 6881 - protein, 7 aa, synthetic construct
  REGION 1..7: note = n-mer motif
LETVGSP

SEQ ID NO: 6882 - DNA, 21 bp, synthetic construct
  misc_feature 1..21: note = n-mer motif encoding polynucleotide
  source 1..21: mol_type = other DNA
ctggagacggttggttctccg

SEQ ID NO: 6883 - protein, 7 aa, synthetic construct
  REGION 1..7: note = n-mer motif
VGRDFPA

SEQ ID NO: 6884 - DNA, 21 bp, synthetic construct
  misc_feature 1..21: note = n-mer motif encoding polynucleotide
  source 1..21: mol_type = other DNA
gtgggtcgggattttccggct

SEQ ID NO: 6885 - protein, 7 aa, synthetic construct
  REGION 1..7: note = n-mer motif
STQGGLA

SEQ ID NO: 6886 - DNA, 21 bp, synthetic construct
  misc_feature 1..21: note = n-mer motif encoding polynucleotide
  source 1..21: mol_type = other DNA
agtacccaaggcggattagcg

SEQ ID NO: 6887 - protein, 7 aa, synthetic construct
  REGION 1..7: note = n-mer motif
TAVERAW

SEQ ID NO: 6888 - DNA, 21 bp, synthetic construct
  misc_feature 1..21: note = n-mer motif encoding polynucleotide
  source 1..21: mol_type = other DNA
acggctgttgagcgggcgtgg

SEQ ID NO: 6889 - protein, 7 aa, synthetic construct
  REGION 1..7: note = n-mer motif
PLVGAPV

SEQ ID NO: 6890 - DNA, 21 bp, synthetic construct
  misc_feature 1..21: note = n-mer motif encoding polynucleotide
  source 1..21: mol_type = other DNA
ccgctggttggggctccggtt

SEQ ID NO: 6891 - protein, 7 aa, synthetic construct
  REGION 1..7: note = n-mer motif
ITQAAYV

SEQ ID NO: 6892 - DNA, 21 bp, synthetic construct
  misc_feature 1..21: note = n-mer motif encoding polynucleotide
  source 1..21: mol_type = other DNA
atcacacaagcggcgtacgtg

SEQ ID NO: 6893 - protein, 7 aa, synthetic construct
  REGION 1..7: note = n-mer motif
LGGDVVA

SEQ ID NO: 6894 - DNA, 21 bp, synthetic construct
  misc_feature 1..21: note = n-mer motif encoding polynucleotide
  source 1..21: mol_type = other DNA
ttgggtggtgatgtggtggcg

SEQ ID NO: 6895 - protein, 7 aa, synthetic construct
  REGION 1..7: note = n-mer motif
NGSSIGV

SEQ ID NO: 6896 - DNA, 21 bp, synthetic construct
  misc_feature 1..21: note = n-mer motif encoding polynucleotide
  source 1..21: mol_type = other DNA
aacggctcatctatcggcgtg

SEQ ID NO: 6897 - protein, 7 aa, synthetic construct
  REGION 1..7: note = n-mer motif
TGSIPSP

SEQ ID NO: 6898 - DNA, 21 bp, synthetic construct
  misc_feature 1..21: note = n-mer motif encoding polynucleotide
  source 1..21: mol_type = other DNA
accggttcaatcccttccccc

SEQ ID NO: 6899 - protein, 7 aa, synthetic construct
  REGION 1..7: note = n-mer motif
GLEKMTS

SEQ ID NO: 6900 - DNA, 21 bp, synthetic construct
  misc_feature 1..21: note = n-mer motif encoding polynucleotide
  source 1..21: mol_type = other DNA
ggtctggagaagatgacttct

SEQ ID NO: 6901 - protein, 7 aa, synthetic construct
  REGION 1..7: note = n-mer motif
QADDHGR

SEQ ID NO: 6902 - DNA, 21 bp, synthetic construct
  misc_feature 1..21: note = n-mer motif encoding polynucleotide
  source 1..21: mol_type = other DNA
caggcggatgatcatggtagg

SEQ ID NO: 6903 - protein, 7 aa, synthetic construct
  REGION 1..7: note = n-mer motif
TMLAGSI

SEQ ID NO: 6904 - DNA, 21 bp, synthetic construct
  misc_feature 1..21: note = n-mer motif encoding polynucleotide
  source 1..21: mol_type = other DNA
accatgctagcaggcagcatc

SEQ ID NO: 6905 - protein, 7 aa, synthetic construct
  REGION 1..7: note = n-mer motif
ASIPTLN

SEQ ID NO: 6906 - DNA, 21 bp, synthetic construct
  misc_feature 1..21: note = n-mer motif encoding polynucleotide
  source 1..21: mol_type = other DNA
gcatccataccaacgctaaac

SEQ ID NO: 6907 - protein, 7 aa, synthetic construct
  REGION 1..7: note = n-mer motif
LHNLTQP

SEQ ID NO: 6908 - DNA, 21 bp, synthetic construct
  misc_feature 1..21: note = n-mer motif encoding polynucleotide
  source 1..21: mol_type = other DNA
cttcataatcttacgcagcct

SEQ ID NO: 6909 - protein, 7 aa, synthetic construct
  REGION 1..7: note = n-mer motif
LTAISDH

SEQ ID NO: 6910 - DNA, 21 bp, synthetic construct
  misc_feature 1..21: note = n-mer motif encoding polynucleotide
  source 1..21: mol_type = other DNA
cttacggcgattagtgatcat

SEQ ID NO: 6911 - protein, 7 aa, synthetic construct
  REGION 1..7: note = n-mer motif
VAALGMT

SEQ ID NO: 6912 - DNA, 21 bp, synthetic construct
  misc_feature 1..21: note = n-mer motif encoding polynucleotide
  source 1..21: mol_type = other DNA
gttgctgctttgggtatgact

SEQ ID NO: 6913 - protein, 7 aa, synthetic construct
  REGION 1..7: note = n-mer motif
ALGDALR

SEQ ID NO: 6914 - DNA, 21 bp, synthetic construct
  misc_feature 1..21: note = n-mer motif encoding polynucleotide
  source 1..21: mol_type = other DNA
gcactaggcgacgcattacgc

SEQ ID NO: 6915 - protein, 7 aa, synthetic construct
  REGION 1..7: note = n-mer motif
GSGNGGS

SEQ ID NO: 6916 - DNA, 21 bp, synthetic construct
  misc_feature 1..21: note = n-mer motif encoding polynucleotide
  source 1..21: mol_type = other DNA
ggtagtgggaatggtgggagt

SEQ ID NO: 6917 - protein, 7 aa, synthetic construct
  REGION 1..7: note = n-mer motif
SADSSVR

SEQ ID NO: 6918 - DNA, 21 bp, synthetic construct
  misc_feature 1..21: note = n-mer motif encoding polynucleotide
  source 1..21: mol_type = other DNA
tcggcggatagttctgtgcgg

SEQ ID NO: 6919 - protein, 7 aa, synthetic construct
  REGION 1..7: note = n-mer motif
SVATGVL

SEQ ID NO: 6920 - DNA, 21 bp, synthetic construct
  misc_feature 1..21: note = n-mer motif encoding polynucleotide
  source 1..21: mol_type = other DNA
agcgtggctacaggcgtgctc

SEQ ID NO: 6921 - protein, 7 aa, synthetic construct
  REGION 1..7: note = n-mer motif
LVTGMSS

SEQ ID NO: 6922 - DNA, 21 bp, synthetic construct
  misc_feature 1..21: note = n-mer motif encoding polynucleotide
  source 1..21: mol_type = other DNA
cttgttactgggatgagttct

SEQ ID NO: 6923 - protein, 7 aa, synthetic construct
  REGION 1..7: note = n-mer motif
MVTSGLT

SEQ ID NO: 6924 - DNA, 21 bp, synthetic construct
  misc_feature 1..21: note = n-mer motif encoding polynucleotide
  source 1..21: mol_type = other DNA
atggttacgtcggggttgacg

SEQ ID NO: 6925 - protein, 7 aa, synthetic construct
  REGION 1..7: note = n-mer motif
PREHNQA

SEQ ID NO: 6926 - DNA, 21 bp, synthetic construct
  misc_feature 1..21: note = n-mer motif encoding polynucleotide
  source 1..21: mol_type = other DNA
ccgcgtgagcataatcaggct

SEQ ID NO: 6927 - protein, 7 aa, synthetic construct
  REGION 1..7: note = n-mer motif
TSPGLMV

SEQ ID NO: 6928 - DNA, 21 bp, synthetic construct
  misc_feature 1..21: note = n-mer motif encoding polynucleotide
  source 1..21: mol_type = other DNA
acatcacccggcctgatggtt

SEQ ID NO: 6929 - protein, 7 aa, synthetic construct
  REGION 1..7: note = n-mer motif
PQHIDPE

SEQ ID NO: 6930 - DNA, 21 bp, synthetic construct
  misc_feature 1..21: note = n-mer motif encoding polynucleotide
  source 1..21: mol_type = other DNA
cctcagcatattgatcctgag

SEQ ID NO: 6931 - protein, 7 aa, synthetic construct
  REGION 1..7: note = n-mer motif
GGVSATA

SEQ ID NO: 6932 - DNA, 21 bp, synthetic construct
  misc_feature 1..21: note = n-mer motif encoding polynucleotide
  source 1..21: mol_type = other DNA
ggaggagtcagcgcaacggct

SEQ ID NO: 6933 - protein, 7 aa, synthetic construct
  REGION 1..7: note = n-mer motif
SLVQGTV

SEQ ID NO: 6934 - DNA, 21 bp, synthetic construct
  misc_feature 1..21: note = n-mer motif encoding polynucleotide
  source 1..21: mol_type = other DNA
agtcttgtgcaggggactgtt

SEQ ID NO: 6935 - protein, 7 aa, synthetic construct
  REGION 1..7: note = n-mer motif
SGEPLGL

SEQ ID NO: 6936 - DNA, 21 bp, synthetic construct
  misc_feature 1..21: note = n-mer motif encoding polynucleotide
  source 1..21: mol_type = other DNA
tctggggagccgcttgggctt

SEQ ID NO: 6937 - protein, 7 aa, synthetic construct
  REGION 1..7: note = n-mer motif
SQLSVML

SEQ ID NO: 6938 - DNA, 21 bp, synthetic construct
  misc_feature 1..21: note = n-mer motif encoding polynucleotide
  source 1..21: mol_type = other DNA
agccaactttcagtaatgctt

SEQ ID NO: 6939 - protein, 7 aa, synthetic construct
  REGION 1..7: note = n-mer motif
TLTDVVH

SEQ ID NO: 6940 - DNA, 21 bp, synthetic construct
  misc_feature 1..21: note = n-mer motif encoding polynucleotide
  source 1..21: mol_type = other DNA
actcttactgatgtggtgcat

SEQ ID NO: 6941 - protein, 7 aa, synthetic construct
  REGION 1..7: note = n-mer motif
QDGPAVK

SEQ ID NO: 6942 - DNA, 21 bp, synthetic construct
  misc_feature 1..21: note = n-mer motif encoding polynucleotide
  source 1..21: mol_type = other DNA
caggatgggcctgcggtgaag

SEQ ID NO: 6943 - protein, 7 aa, synthetic construct
  REGION 1..7: note = n-mer motif
RGQSDPL

SEQ ID NO: 6944 - DNA, 21 bp, synthetic construct
  misc_feature 1..21: note = n-mer motif encoding polynucleotide
  source 1..21: mol_type = other DNA
cgggggcagtctgatccgttg

SEQ ID NO: 6945 - protein, 7 aa, synthetic construct
  REGION 1..7: note = n-mer motif
IMVGTTT

SEQ ID NO: 6946 - DNA, 21 bp, synthetic construct
  misc_feature 1..21: note = n-mer motif encoding polynucleotide
  source 1..21: mol_type = other DNA
ataatggtaggtacgactacg

SEQ ID NO: 6947 - protein, 7 aa, synthetic construct
  REGION 1..7: note = n-mer motif
LGSDESR

SEQ ID NO: 6948 - DNA, 21 bp, synthetic construct
  misc_feature 1..21: note = n-mer motif encoding polynucleotide
  source 1..21: mol_type = other DNA
ctggggtcggatgagagtcgg

SEQ ID NO: 6949 - protein, 7 aa, synthetic construct
  REGION 1..7: note = n-mer motif
NLGGVQL

SEQ ID NO: 6950 - DNA, 21 bp, synthetic construct
  misc_feature 1..21: note = n-mer motif encoding polynucleotide
  source 1..21: mol_type = other DNA
aacttaggaggcgtccaattg

SEQ ID NO: 6951 - protein, 7 aa, synthetic construct
  REGION 1..7: note = n-mer motif
SEQNKVW

SEQ ID NO: 6952 - DNA, 21 bp, synthetic construct
  misc_feature 1..21: note = n-mer motif encoding polynucleotide
  source 1..21: mol_type = other DNA
tccgaacaaaacaaagtatgg

SEQ ID NO: 6953 - protein, 7 aa, synthetic construct
  REGION 1..7: note = n-mer motif
ANSHTNS

SEQ ID NO: 6954 - DNA, 21 bp, synthetic construct
  misc_feature 1..21: note = n-mer motif encoding polynucleotide
  source 1..21: mol_type = other DNA
gcaaacagtcacaccaactct

SEQ ID NO: 6955 - protein, 7 aa, synthetic construct
  REGION 1..7: note = n-mer motif
ATVKDSG

SEQ ID NO: 6956 - DNA, 21 bp, synthetic construct
  misc_feature 1..21: note = n-mer motif encoding polynucleotide
  source 1..21: mol_type = other DNA
gcaaccgtaaaagactcgggg

SEQ ID NO: 6957 - protein, 7 aa, synthetic construct
  REGION 1..7: note = n-mer motif
NGLSAST

SEQ ID NO: 6958 - DNA, 21 bp, synthetic construct
  misc_feature 1..21: note = n-mer motif encoding polynucleotide
  source 1..21: mol_type = other DNA
aatgggctgtctgcttctact

SEQ ID NO: 6959 - protein, 7 aa, synthetic construct
  REGION 1..7: note = n-mer motif
VMASTGP

SEQ ID NO: 6960 - DNA, 21 bp, synthetic construct
  misc_feature 1..21: note = n-mer motif encoding polynucleotide
  source 1..21: mol_type = other DNA
gtaatggcgtcaacaggaccg

SEQ ID NO: 6961 - protein, 7 aa, synthetic construct
  REGION 1..7: note = n-mer motif
VTTHSPV

SEQ ID NO: 6962 - DNA, 21 bp, synthetic construct
  misc_feature 1..21: note = n-mer motif encoding polynucleotide
  source 1..21: mol_type = other DNA
gttaccacccacagtccagtt

SEQ ID NO: 6963 - protein, 7 aa, synthetic construct
  REGION 1..7: note = n-mer motif
LSLNDVV

SEQ ID NO: 6964 - DNA, 21 bp, synthetic construct
  misc_feature 1..21: note = n-mer motif encoding polynucleotide
  source 1..21: mol_type = other DNA
ctgagtttgaatgatgtggtt

SEQ ID NO: 6965 - protein, 7 aa, synthetic construct
  REGION 1..7: note = n-mer motif
AHTEMSH

SEQ ID NO: 6966 - DNA, 21 bp, synthetic construct
  misc_feature 1..21: note = n-mer motif encoding polynucleotide
  source 1..21: mol_type = other DNA
gcccacaccgaaatgtctcac

SEQ ID NO: 6967 - protein, 7 aa, synthetic construct
  REGION 1..7: note = n-mer motif
DVAVSMI

SEQ ID NO: 6968 - DNA, 21 bp, synthetic construct
  misc_feature 1..21: note = n-mer motif encoding polynucleotide
  source 1..21: mol_type = other DNA
gatgttgctgtttctatgatt

SEQ ID NO: 6969 - protein, 7 aa, synthetic construct
  REGION 1..7: note = n-mer motif
FPAGVGQ

SEQ ID NO: 6970 - DNA, 21 bp, synthetic construct
  misc_feature 1..21: note = n-mer motif encoding polynucleotide
  source 1..21: mol_type = other DNA
tttccggctggtgttgggcag

SEQ ID NO: 6971 - protein, 7 aa, synthetic construct
  REGION 1..7: note = n-mer motif
VTTLSPV

SEQ ID NO: 6972 - DNA, 21 bp, synthetic construct
  misc_feature 1..21: note = n-mer motif encoding polynucleotide
  source 1..21: mol_type = other DNA
gtcacgactttgagtccagtt

SEQ ID NO: 6973 - protein, 7 aa, synthetic construct
  REGION 1..7: note = n-mer motif
LIGAALD

SEQ ID NO: 6974 - DNA, 21 bp, synthetic construct
  misc_feature 1..21: note = n-mer motif encoding polynucleotide
  source 1..21: mol_type = other DNA
ctaatcggcgcagcactcgac

SEQ ID NO: 6975 - protein, 7 aa, synthetic construct
  REGION 1..7: note = n-mer motif
VLSSDLR

SEQ ID NO: 6976 - DNA, 21 bp, synthetic construct
  misc_feature 1..21: note = n-mer motif encoding polynucleotide
  source 1..21: mol_type = other DNA
gtgctttcgagtgatcttcgt

SEQ ID NO: 6977 - protein, 7 aa, synthetic construct
  REGION 1..7: note = n-mer motif
QHGAEAR

SEQ ID NO: 6978 - DNA, 21 bp, synthetic construct
  misc_feature 1..21: note = n-mer motif encoding polynucleotide
  source 1..21: mol_type = other DNA
cagcatggggcggaggcgagg

SEQ ID NO: 6979 - protein, 7 aa, synthetic construct
  REGION 1..7: note = n-mer motif
SHGSDPK

SEQ ID NO: 6980 - DNA, 21 bp, synthetic construct
  misc_feature 1..21: note = n-mer motif encoding polynucleotide
  source 1..21: mol_type = other DNA
tctcatggttctgatccgaag

SEQ ID NO: 6981 - protein, 7 aa, synthetic construct
  REGION 1..7: note = n-mer motif
MNGGNVL

SEQ ID NO: 6982 - DNA, 21 bp, synthetic construct
  misc_feature 1..21: note = n-mer motif encoding polynucleotide
  source 1..21: mol_type = other DNA
atgaacggcggcaacgtgctc

SEQ ID NO: 6983 - protein, 7 aa, synthetic construct
  REGION 1..7: note = n-mer motif
RVDSGLL

SEQ ID NO: 6984 - DNA, 21 bp, synthetic construct
  misc_feature 1..21: note = n-mer motif encoding polynucleotide
  source 1..21: mol_type = other DNA
agggttgatagtgggctgctt

SEQ ID NO: 6985 - protein, 7 aa, synthetic construct
  REGION 1..7: note = n-mer motif
IPSTGAQ

SEQ ID NO: 6986 - DNA, 21 bp, synthetic construct
  misc_feature 1..21: note = n-mer motif encoding polynucleotide
  source 1..21: mol_type = other DNA
attccgagtacgggggcgcag

SEQ ID NO: 6987 - protein, 7 aa, synthetic construct
  REGION 1..7: note = n-mer motif
VIAGLGF

SEQ ID NO: 6988 - DNA, 21 bp, synthetic construct
  misc_feature 1..21: note = n-mer motif encoding polynucleotide
  source 1..21: mol_type = other DNA
gtaatcgcaggcttaggtttc

SEQ ID NO: 6989 - protein, 7 aa, synthetic construct
  REGION 1..7: note = n-mer motif
FGVSALS

SEQ ID NO: 6990 - DNA, 21 bp, synthetic construct
  misc_feature 1..21: note = n-mer motif encoding polynucleotide
  source 1..21: mol_type = other DNA
tttggtgttagtgctctttct

SEQ ID NO: 6991 - protein, 7 aa, synthetic construct
  REGION 1..7: note = n-mer motif
SPAGLLA

SEQ ID NO: 6992 - DNA, 21 bp, synthetic construct
  misc_feature 1..21: note = n-mer motif encoding polynucleotide
  source 1..21: mol_type = other DNA
tcgccggcggggttgcttgcg

SEQ ID NO: 6993 - protein, 7 aa, synthetic construct
  REGION 1..7: note = n-mer motif
STIPTPM

SEQ ID NO: 6994 - DNA, 21 bp, synthetic construct
  misc_feature 1..21: note = n-mer motif encoding polynucleotide
  source 1..21: mol_type = other DNA
tccacaatcccaacccccatg

SEQ ID NO: 6995 - protein, 7 aa, synthetic construct
  REGION 1..7: note = n-mer motif
PKPSHGE

SEQ ID NO: 6996 - DNA, 21 bp, synthetic construct
  misc_feature 1..21: note = n-mer motif encoding polynucleotide
  source 1..21: mol_type = other DNA
ccgaagcctagtcatggtgag

SEQ ID NO: 6997 - protein, 7 aa, synthetic construct
  REGION 1..7: note = n-mer motif
DALSSLR

SEQ ID NO: 6998 - DNA, 21 bp, synthetic construct
  misc_feature 1..21: note = n-mer motif encoding polynucleotide
  source 1..21: mol_type = other DNA
gacgctttatccagcttgcga

SEQ ID NO: 6999 - protein, 7 aa, synthetic construct
  REGION 1..7: note = n-mer motif
STDMRSP

SEQ ID NO: 7000 - DNA, 21 bp, synthetic construct
  misc_feature 1..21: note = n-mer motif encoding polynucleotide
  source 1..21: mol_type = other DNA
agtacggatatgaggtcgccg

SEQ ID NO: 7001 - protein, 7 aa, synthetic construct
  REGION 1..7: note = n-mer motif
AVFSSQK

SEQ ID NO: 7002 - DNA, 21 bp, synthetic construct
  misc_feature 1..21: note = n-mer motif encoding polynucleotide
  source 1..21: mol_type = other DNA
gctgtattctccagtcaaaaa

SEQ ID NO: 7003 - protein, 7 aa, synthetic construct
  REGION 1..7: note = n-mer motif
RSEVNGV

SEQ ID NO: 7004 - DNA, 21 bp, synthetic construct
  misc_feature 1..21: note = n-mer motif encoding polynucleotide
  source 1..21: mol_type = other DNA
cggagtgaggtgaatggggtt

SEQ ID NO: 7005 - protein, 7 aa, synthetic construct
  REGION 1..7: note = n-mer motif
ATVAGQY

SEQ ID NO: 7006 - DNA, 21 bp, synthetic construct
  misc_feature 1..21: note = n-mer motif encoding polynucleotide
  source 1..21: mol_type = other DNA
gctaccgtggcaggccaatac

SEQ ID NO: 7007 - protein, 7 aa, synthetic construct
  REGION 1..7: note = n-mer motif
SVVVTAR

SEQ ID NO: 7008 - DNA, 21 bp, synthetic construct
  misc_feature 1..21: note = n-mer motif encoding polynucleotide
  source 1..21: mol_type = other DNA
tcggtcgtcgtaacagctcgg

SEQ ID NO: 7009 - protein, 7 aa, synthetic construct
  REGION 1..7: note = n-mer motif
GIDTSQP

SEQ ID NO: 7010 - DNA, 21 bp, synthetic construct
  misc_feature 1..21: note = n-mer motif encoding polynucleotide
  source 1..21: mol_type = other DNA
ggcatagacacatcccaaccc

SEQ ID NO: 7011 - protein, 7 aa, synthetic construct
  REGION 1..7: note = n-mer motif
VVQVPGR

SEQ ID NO: 7012 - DNA, 21 bp, synthetic construct
  misc_feature 1..21: note = n-mer motif encoding polynucleotide
  source 1..21: mol_type = other DNA
gtagtgcaagtaccaggacgc

SEQ ID NO: 7013 - protein, 7 aa, synthetic construct
  REGION 1..7: note = n-mer motif
ITGVYDK

SEQ ID NO: 7014 - DNA, 21 bp, synthetic construct
  misc_feature 1..21: note = n-mer motif encoding polynucleotide
  source 1..21: mol_type = other DNA
ataactggcgtttacgacaaa

SEQ ID NO: 7015 - protein, 7 aa, synthetic construct
  REGION 1..7: note = n-mer motif
VVDSYNL

SEQ ID NO: 7016 - DNA, 21 bp, synthetic construct
  misc_feature 1..21: note = n-mer motif encoding polynucleotide
  source 1..21: mol_type = other DNA
gtggtagactcttacaactta

SEQ ID NO: 7017 - protein, 7 aa, synthetic construct
  REGION 1..7: note = n-mer motif
SLGEGRH

SEQ ID NO: 7018 - DNA, 21 bp, synthetic construct
  misc_feature 1..21: note = n-mer motif encoding polynucleotide
  source 1..21: mol_type = other DNA
agtttaggcgaagggcgtcac

SEQ ID NO: 7019 - protein, 7 aa, synthetic construct
  REGION 1..7: note = n-mer motif
SIGLPAQ

SEQ ID NO: 7020 - DNA, 21 bp, synthetic construct
  misc_feature 1..21: note = n-mer motif encoding polynucleotide
  source 1..21: mol_type = other DNA
agtattgggcttcctgcgcag

SEQ ID NO: 7021 - protein, 7 aa, synthetic construct
  REGION 1..7: note = n-mer motif
ASTVSTV

SEQ ID NO: 7022 - DNA, 21 bp, synthetic construct
  misc_feature 1..21: note = n-mer motif encoding polynucleotide
  source 1..21: mol_type = other DNA
gcctccacagtaagtacggtc

SEQ ID NO: 7023 - protein, 7 aa, synthetic construct
  REGION 1..7: note = n-mer motif
MEALAVT

SEQ ID NO: 7024 - DNA, 21 bp, synthetic construct
  misc_feature 1..21: note = n-mer motif encoding polynucleotide
  source 1..21: mol_type = other DNA
atggaagctttggcggtaaca

SEQ ID NO: 7025 - protein, 7 aa, synthetic construct
  REGION 1..7: note = n-mer motif
REISNLR

SEQ ID NO: 7026 - DNA, 21 bp, synthetic construct
  misc_feature 1..21: note = n-mer motif encoding polynucleotide
  source 1..21: mol_type = other DNA
cgggaaataagcaacctacgt

SEQ ID NO: 7027 - protein, 7 aa, synthetic construct
  REGION 1..7: note = n-mer motif
VLDTVGN

SEQ ID NO: 7028 - DNA, 21 bp, synthetic construct
  misc_feature 1..21: note = n-mer motif encoding polynucleotide
  source 1..21: mol_type = other DNA
gttctggatacggttggtaat

SEQ ID NO: 7029 - protein, 7 aa, synthetic construct
  REGION 1..7: note = n-mer motif
AGLGSTS

SEQ ID NO: 7030 - DNA, 21 bp, synthetic construct
  misc_feature 1..21: note = n-mer motif encoding polynucleotide
  source 1..21: mol_type = other DNA
gctggtctggggtcgactagt

SEQ ID NO: 7031 - protein, 7 aa, synthetic construct
  REGION 1..7: note = n-mer motif
VEVPSTN

SEQ ID NO: 7032 - DNA, 21 bp, synthetic construct
  misc_feature 1..21: note = n-mer motif encoding polynucleotide
  source 1..21: mol_type = other DNA
gttgaagtcccttctacgaac

SEQ ID NO: 7033 - protein, 7 aa, synthetic construct
  REGION 1..7: note = n-mer motif
VDHGGVV

SEQ ID NO: 7034 - DNA, 21 bp, synthetic construct
  misc_feature 1..21: note = n-mer motif encoding polynucleotide
  source 1..21: mol_type = other DNA
gtggatcatggtggtgtggtt

SEQ ID NO: 7035 - protein, 7 aa, synthetic construct
  REGION 1..7: note = n-mer motif
GAHIVSA

SEQ ID NO: 7036 - DNA, 21 bp, synthetic construct
  misc_feature 1..21: note = n-mer motif encoding polynucleotide
  source 1..21: mol_type = other DNA
ggggcgcacatagtctccgca

SEQ ID NO: 7037 - protein, 7 aa, synthetic construct
  REGION 1..7: note = n-mer motif
TSREELR

SEQ ID NO: 7038 - DNA, 21 bp, synthetic construct
  misc_feature 1..21: note = n-mer motif encoding polynucleotide
  source 1..21: mol_type = other DNA
acaagtagggaagaattgcga

SEQ ID NO: 7039 - protein, 7 aa, synthetic construct
  REGION 1..7: note = n-mer motif
NGSDTTM

SEQ ID NO: 7040 - DNA, 21 bp, synthetic construct
  misc_feature 1..21: note = n-mer motif encoding polynucleotide
  source 1..21: mol_type = other DNA
aatggttctgatactactatg

SEQ ID NO: 7041 - protein, 7 aa, synthetic construct
  REGION 1..7: note = n-mer motif
KNPGVDT

SEQ ID NO: 7042 - DNA, 21 bp, synthetic construct
  misc_feature 1..21: note = n-mer motif encoding polynucleotide
  source 1..21: mol_type = other DNA
aaaaaccctggagttgacacg

SEQ ID NO: 7043 - protein, 7 aa, synthetic construct
  REGION 1..7: note = n-mer motif
THDKLSV

SEQ ID NO: 7044 - DNA, 21 bp, synthetic construct
  misc_feature 1..21: note = n-mer motif encoding polynucleotide
  source 1..21: mol_type = other DNA
actcatgataagcttagtgtt

SEQ ID NO: 7045 - protein, 7 aa, synthetic construct
  REGION 1..7: note = n-mer motif
NADYGGD

SEQ ID NO: 7046 - DNA, 21 bp, synthetic construct
  misc_feature 1..21: note = n-mer motif encoding polynucleotide
  source 1..21: mol_type = other DNA
aatgctgattatgggggtgat

SEQ ID NO: 7047 - protein, 7 aa, synthetic construct
  REGION 1..7: note = n-mer motif
ILATETS

SEQ ID NO: 7048 - DNA, 21 bp, synthetic construct
  misc_feature 1..21: note = n-mer motif encoding polynucleotide
  source 1..21: mol_type = other DNA
atcctagccacagaaaccagc

SEQ ID NO: 7049 - protein, 7 aa, synthetic construct
  REGION 1..7: note = n-mer motif
TTMADPA

SEQ ID NO: 7050 - DNA, 21 bp, synthetic construct
  misc_feature 1..21: note = n-mer motif encoding polynucleotide
  source 1..21: mol_type = other DNA
acaacaatggcggaccccgcc

SEQ ID NO: 7051 - protein, 7 aa, synthetic construct
  REGION 1..7: note = n-mer motif
VTEHTQF

SEQ ID NO: 7052 - DNA, 21 bp, synthetic construct
  misc_feature 1..21: note = n-mer motif encoding polynucleotide
  source 1..21: mol_type = other DNA
gtgactgagcatacgcagttt

SEQ ID NO: 7053 - protein, 7 aa, synthetic construct
  REGION 1..7: note = n-mer motif
LTGISNV

SEQ ID NO: 7054 - DNA, 21 bp, synthetic construct
  misc_feature 1..21: note = n-mer motif encoding polynucleotide
  source 1..21: mol_type = other DNA
ttaaccggcatctcaaacgta

SEQ ID NO: 7055 - protein, 7 aa, synthetic construct
  REGION 1..7: note = n-mer motif
PVLAAAN

SEQ ID NO: 7056 - DNA, 21 bp, synthetic construct
  misc_feature 1..21: note = n-mer motif encoding polynucleotide
  source 1..21: mol_type = other DNA
cctgttcttgcggcagcgaac

SEQ ID NO: 7057 - protein, 7 aa, synthetic construct
  REGION 1..7: note = n-mer motif
HATVVNS

SEQ ID NO: 7058 - DNA, 21 bp, synthetic construct
  misc_feature 1..21: note = n-mer motif encoding polynucleotide
  source 1..21: mol_type = other DNA
catgcgactgttgttaattcg

SEQ ID NO: 7059 - protein, 7 aa, synthetic construct
  REGION 1..7: note = n-mer motif
AMDNGAF

SEQ ID NO: 7060 - DNA, 21 bp, synthetic construct
  misc_feature 1..21: note = n-mer motif encoding polynucleotide
  source 1..21: mol_type = other DNA
gctatggataatggtgctttt

SEQ ID NO: 7061 - protein, 7 aa, synthetic construct
  REGION 1..7: note = n-mer motif
SVNSIPV

SEQ ID NO: 7062 - DNA, 21 bp, synthetic construct
  misc_feature 1..21: note = n-mer motif encoding polynucleotide
  source 1..21: mol_type = other DNA
tcggtcaacagtataccagtc

SEQ ID NO: 7063 - protein, 7 aa, synthetic construct
  REGION 1..7: note = n-mer motif
NLGVVPL

SEQ ID NO: 7064 - DNA, 21 bp, synthetic construct
  misc_feature 1..21: note = n-mer motif encoding polynucleotide
  source 1..21: mol_type = other DNA
aatttgggtgtggttccgctg

SEQ ID NO: 7065 - protein, 7 aa, synthetic construct
  REGION 1..7: note = n-mer motif
QNSNGLL

SEQ ID NO: 7066 - DNA, 21 bp, synthetic construct
  misc_feature 1..21: note = n-mer motif encoding polynucleotide
  source 1..21: mol_type = other DNA
cagaatagtaatgggcttttg

SEQ ID NO: 7067 - protein, 7 aa, synthetic construct
  REGION 1..7: note = n-mer motif
ESSRLQI

SEQ ID NO: 7068 - DNA, 21 bp, synthetic construct
  misc_feature 1..21: note = n-mer motif encoding polynucleotide
  source 1..21: mol_type = other DNA
gagagttcgcgtcttcagatt

SEQ ID NO: 7069 - protein, 7 aa, synthetic construct
  REGION 1..7: note = n-mer motif
ERQLDSH

SEQ ID NO: 7070 - DNA, 21 bp, synthetic construct
  misc_feature 1..21: note = n-mer motif encoding polynucleotide
  source 1..21: mol_type = other DNA
gagaggcagctggattcgcat

SEQ ID NO: 7071 - protein, 7 aa, synthetic construct
  REGION 1..7: note = n-mer motif
ATTVSPV

SEQ ID NO: 7072 - DNA, 21 bp, synthetic construct
  misc_feature 1..21: note = n-mer motif encoding polynucleotide
  source 1..21: mol_type = other DNA
gcaaccactgtgagccccgta

SEQ ID NO: 7073 - protein, 7 aa, synthetic construct
  REGION 1..7: note = n-mer motif
TPPPNGR

SEQ ID NO: 7074 - DNA, 21 bp, synthetic construct
  misc_feature 1..21: note = n-mer motif encoding polynucleotide
  source 1..21: mol_type = other DNA
acgcctcctcctaatggtagg

SEQ ID NO: 7075 - protein, 7 aa, synthetic construct
  REGION 1..7: note = n-mer motif
QDGPAVK

SEQ ID NO: 7076 - DNA, 21 bp, synthetic construct
  misc_feature 1..21: note = n-mer motif encoding polynucleotide
  source 1..21: mol_type = other DNA
caagacggcccggcagttaaa

SEQ ID NO: 7077 - protein, 7 aa, synthetic construct
  REGION 1..7: note = n-mer motif
VGVNGSH

SEQ ID NO: 7078 - DNA, 21 bp, synthetic construct
  misc_feature 1..21: note = n-mer motif encoding polynucleotide
  source 1..21: mol_type = other DNA
gtgggtgtgaatggttctcat

SEQ ID NO: 7079 - protein, 7 aa, synthetic construct
  REGION 1..7: note = n-mer motif
TVPNTVL

SEQ ID NO: 7080 - DNA, 21 bp, synthetic construct
  misc_feature 1..21: note = n-mer motif encoding polynucleotide
  source 1..21: mol_type = other DNA
acagtacccaacacagtcctt

SEQ ID NO: 7081 - protein, 7 aa, synthetic construct
  REGION 1..7: note = n-mer motif
HGVSIEL

SEQ ID NO: 7082 - DNA, 21 bp, synthetic construct
  misc_feature 1..21: note = n-mer motif encoding polynucleotide
  source 1..21: mol_type = other DNA
catggtgtttcgattgagctg

SEQ ID NO: 7083 - protein, 7 aa, synthetic construct
  REGION 1..7: note = n-mer motif
SSQGTTK

SEQ ID NO: 7084 - DNA, 21 bp, synthetic construct
  misc_feature 1..21: note = n-mer motif encoding polynucleotide
  source 1..21: mol_type = other DNA
tcttcgcagggtacgactaag

SEQ ID NO: 7085 - protein, 7 aa, synthetic construct
  REGION 1..7: note = n-mer motif
TVGHDNK

SEQ ID NO: 7086 - DNA, 21 bp, synthetic construct
  misc_feature 1..21: note = n-mer motif encoding polynucleotide
  source 1..21: mol_type = other DNA
accgtaggacacgacaacaaa

SEQ ID NO: 7087 - protein, 7 aa, synthetic construct
  REGION 1..7: note = n-mer motif
QGGHSGG

SEQ ID NO: 7088 - DNA, 21 bp, synthetic construct
  misc_feature 1..21: note = n-mer motif encoding polynucleotide
  source 1..21: mol_type = other DNA
cagggtggtcatagtgggggt

SEQ ID NO: 7089 - protein, 7 aa, synthetic construct
  REGION 1..7: note = n-mer motif
LTDGTVV

SEQ ID NO: 7090 - DNA, 21 bp, synthetic construct
  misc_feature 1..21: note = n-mer motif encoding polynucleotide
  source 1..21: mol_type = other DNA
cttactgatgggactgttgtt

SEQ ID NO: 7091 - protein, 7 aa, synthetic construct
  REGION 1..7: note = n-mer motif
VGASTAW

SEQ ID NO: 7092 - DNA, 21 bp, synthetic construct
  misc_feature 1..21: note = n-mer motif encoding polynucleotide
  source 1..21: mol_type = other DNA
gtgggcgccagcaccgcgtgg

SEQ ID NO: 7093 - protein, 7 aa, synthetic construct
  REGION 1..7: note = n-mer motif
VSRGEEM

SEQ ID NO: 7094 - DNA, 21 bp, synthetic construct
  misc_feature 1..21: note = n-mer motif encoding polynucleotide
  source 1..21: mol_type = other DNA
gtaagccgcggcgaagaaatg

SEQ ID NO: 7095 - protein, 7 aa, synthetic construct
  REGION 1..7: note = n-mer motif
SIYDNDT

SEQ ID NO: 7096 - DNA, 21 bp, synthetic construct
  misc_feature 1..21: note = n-mer motif encoding polynucleotide
  source 1..21: mol_type = other DNA
tccatctacgacaacgacacc

SEQ ID NO: 7097 - protein, 7 aa, synthetic construct
  REGION 1..7: note = n-mer motif
RETVDST

SEQ ID NO: 7098 - DNA, 21 bp, synthetic construct
  misc_feature 1..21: note = n-mer motif encoding polynucleotide
  source 1..21: mol_type = other DNA
cgtgagactgtggatagtact

SEQ ID NO: 7099 - protein, 7 aa, synthetic construct
  REGION 1..7: note = n-mer motif
STEGAAL

SEQ ID NO: 7100 - DNA, 21 bp, synthetic construct
  misc_feature 1..21: note = n-mer motif encoding polynucleotide
  source 1..21: mol_type = other DNA
agtacggagggggcggctctg

SEQ ID NO: 7101 - protein, 7 aa, synthetic construct
  REGION 1..7: note = n-mer motif
ASREVIY

SEQ ID NO: 7102 - DNA, 21 bp, synthetic construct
  misc_feature 1..21: note = n-mer motif encoding polynucleotide
  source 1..21: mol_type = other DNA
gcatcgagagaagtcatctac

SEQ ID NO: 7103 - protein, 7 aa, synthetic construct
  REGION 1..7: note = n-mer motif
TEALAVK

SEQ ID NO: 7104 - DNA, 21 bp, synthetic construct
  misc_feature 1..21: note = n-mer motif encoding polynucleotide
  source 1..21: mol_type = other DNA
acagaagcacttgcggtaaaa

SEQ ID NO: 7105 - protein, 7 aa, synthetic construct
  REGION 1..7: note = n-mer motif
PTPGTLR

SEQ ID NO: 7106 - DNA, 21 bp, synthetic construct
  misc_feature 1..21: note = n-mer motif encoding polynucleotide
  source 1..21: mol_type = other DNA
ccgacaccaggaactttaaga

SEQ ID NO: 7107 - protein, 7 aa, synthetic construct
  REGION 1..7: note = n-mer motif
GSGGVSV

SEQ ID NO: 7108 - DNA, 21 bp, synthetic construct
  misc_feature 1..21: note = n-mer motif encoding polynucleotide
  source 1..21: mol_type = other DNA
ggttcgggtggtgttagtgtg

SEQ ID NO: 7109 - protein, 7 aa, synthetic construct
  REGION 1..7: note = n-mer motif
PTQGVSM

SEQ ID NO: 7110 - DNA, 21 bp, synthetic construct
  misc_feature 1..21: note = n-mer motif encoding polynucleotide
  source 1..21: mol_type = other DNA
ccaacccaaggagtttcgatg

SEQ ID NO: 7111 - protein, 7 aa, synthetic construct
  REGION 1..7: note = n-mer motif
VRQLDSN

SEQ ID NO: 7112 - DNA, 21 bp, synthetic construct
  misc_feature 1..21: note = n-mer motif encoding polynucleotide
  source 1..21: mol_type = other DNA
gtaagacaacttgactctaac

SEQ ID NO: 7113 - protein, 7 aa, synthetic construct
  REGION 1..7: note = n-mer motif
MGVLTTV

SEQ ID NO: 7114 - DNA, 21 bp, synthetic construct
  misc_feature 1..21: note = n-mer motif encoding polynucleotide
  source 1..21: mol_type = other DNA
atgggggtgttgactacggtg

SEQ ID NO: 7115 - protein, 7 aa, synthetic construct
  REGION 1..7: note = n-mer motif
SLSDGSL

SEQ ID NO: 7116 - DNA, 21 bp, synthetic construct
  misc_feature 1..21: note = n-mer motif encoding polynucleotide
  source 1..21: mol_type = other DNA
tctctgtctgatggttctctt

SEQ ID NO: 7117 - protein, 7 aa, synthetic construct
  REGION 1..7: note = n-mer motif
HSEGVGR

SEQ ID NO: 7118 - DNA, 21 bp, synthetic construct
  misc_feature 1..21: note = n-mer motif encoding polynucleotide
  source 1..21: mol_type = other DNA
cactcggaaggagtcggacgc

SEQ ID NO: 7119 - protein, 7 aa, synthetic construct
  REGION 1..7: note = n-mer motif
WNLDMNN

SEQ ID NO: 7120 - DNA, 21 bp, synthetic construct
  misc_feature 1..21: note = n-mer motif encoding polynucleotide
  source 1..21: mol_type = other DNA
tggaacctagacatgaacaac

SEQ ID NO: 7121 - protein, 7 aa, synthetic construct
  REGION 1..7: note = n-mer motif
LGHKAGD

SEQ ID NO: 7122 - DNA, 21 bp, synthetic construct
  misc_feature 1..21: note = n-mer motif encoding polynucleotide
  source 1..21: mol_type = other DNA
ttggggcataaggctggtgat

SEQ ID NO: 7123 - protein, 7 aa, synthetic construct
  REGION 1..7: note = n-mer motif
NLGVVNL

SEQ ID NO: 7124 - DNA, 21 bp, synthetic construct
  misc_feature 1..21: note = n-mer motif encoding polynucleotide
  source 1..21: mol_type = other DNA
aacttaggcgtcgtcaacctt

SEQ ID NO: 7125 - protein, 7 aa, synthetic construct
  REGION 1..7: note = n-mer motif
SGGRITD

SEQ ID NO: 7126 - DNA, 21 bp, synthetic construct
  misc_feature 1..21: note = n-mer motif encoding polynucleotide
  source 1..21: mol_type = other DNA
agcggagggcgcatcaccgac

SEQ ID NO: 7127 - protein, 7 aa, synthetic construct
  REGION 1..7: note = n-mer motif
TVITGAP

SEQ ID NO: 7128 - DNA, 21 bp, synthetic construct
  misc_feature 1..21: note = n-mer motif encoding polynucleotide
  source 1..21: mol_type = other DNA
actgtgatcactggcgccccc

SEQ ID NO: 7129 - protein, 7 aa, synthetic construct
  REGION 1..7: note = n-mer motif
SQLAELV

SEQ ID NO: 7130 - DNA, 21 bp, synthetic construct
  misc_feature 1..21: note = n-mer motif encoding polynucleotide
  source 1..21: mol_type = other DNA
agtcagttggcggagctggtt

SEQ ID NO: 7131 - protein, 7 aa, synthetic construct
  REGION 1..7: note = n-mer motif
SVTDVRH

SEQ ID NO: 7132 - DNA, 21 bp, synthetic construct
  misc_feature 1..21: note = n-mer motif encoding polynucleotide
  source 1..21: mol_type = other DNA
tctgttactgatgttaggcat

SEQ ID NO: 7133 - protein, 7 aa, synthetic construct
  REGION 1..7: note = n-mer motif
DVAGSMR

SEQ ID NO: 7134 - DNA, 21 bp, synthetic construct
  misc_feature 1..21: note = n-mer motif encoding polynucleotide
  source 1..21: mol_type = other DNA
gatgttgctggttctatgcgt

SEQ ID NO: 7135 - protein, 7 aa, synthetic construct
  REGION 1..7: note = n-mer motif
VVQAPGR

SEQ ID NO: 7136 - DNA, 21 bp, synthetic construct
  misc_feature 1..21: note = n-mer motif encoding polynucleotide
  source 1..21: mol_type = other DNA
gttgttcaggctcctgggcgt

SEQ ID NO: 7137 - protein, 7 aa, synthetic construct
  REGION 1..7: note = n-mer motif
NLGAALS

SEQ ID NO: 7138 - DNA, 21 bp, synthetic construct
  misc_feature 1..21: note = n-mer motif encoding polynucleotide
  source 1..21: mol_type = other DNA
aatctgggtgcggcgctttct

SEQ ID NO: 7139 - protein, 7 aa, synthetic construct
  REGION 1..7: note = n-mer motif
KYSGAES

SEQ ID NO: 7140 - DNA, 21 bp, synthetic construct
  misc_feature 1..21: note = n-mer motif encoding polynucleotide
  source 1..21: mol_type = other DNA
aaatactctggcgcggaatct

SEQ ID NO: 7141 - protein, 7 aa, synthetic construct
  REGION 1..7: note = n-mer motif
VSATLGQ

SEQ ID NO: 7142 - DNA, 21 bp, synthetic construct
  misc_feature 1..21: note = n-mer motif encoding polynucleotide
  source 1..21: mol_type = other DNA
gtatcagccacactaggccaa

SEQ ID NO: 7143 - protein, 7 aa, synthetic construct
  REGION 1..7: note = n-mer motif
AGVSELL

SEQ ID NO: 7144 - DNA, 21 bp, synthetic construct
  misc_feature 1..21: note = n-mer motif encoding polynucleotide
  source 1..21: mol_type = other DNA
gcgggtgtttctgagttgttg

SEQ ID NO: 7145 - protein, 7 aa, synthetic construct
  REGION 1..7: note = n-mer motif
PLLGNTI

SEQ ID NO: 7146 - DNA, 21 bp, synthetic construct
  misc_feature 1..21: note = n-mer motif encoding polynucleotide
  source 1..21: mol_type = other DNA
ccgcttttggggaatacgatt

SEQ ID NO: 7147 - protein, 7 aa, synthetic construct
  REGION 1..7: note = n-mer motif
TAGLSHP

SEQ ID NO: 7148 - DNA, 21 bp, synthetic construct
  misc_feature 1..21: note = n-mer motif encoding polynucleotide
  source 1..21: mol_type = other DNA
accgcaggattgtcacaccct

SEQ ID NO: 7149 - protein, 7 aa, synthetic construct
  REGION 1..7: note = n-mer motif
RSNSAEW

SEQ ID NO: 7150 - DNA, 21 bp, synthetic construct
  misc_feature 1..21: note = n-mer motif encoding polynucleotide
  source 1..21: mol_type = other DNA
agatcgaactccgcggaatgg

SEQ ID NO: 7151 - protein, 7 aa, synthetic construct
  REGION 1..7: note = n-mer motif
DTGVGTR

SEQ ID NO: 7152 - DNA, 21 bp, synthetic construct
  misc_feature 1..21: note = n-mer motif encoding polynucleotide
  source 1..21: mol_type = other DNA
gatactggggttggtacgcgt

SEQ ID NO: 7153 - protein, 7 aa, synthetic construct
  REGION 1..7: note = n-mer motif
PLILSPS

SEQ ID NO: 7154 - DNA, 21 bp, synthetic construct
  misc_feature 1..21: note = n-mer motif encoding polynucleotide
  source 1..21: mol_type = other DNA
cccttgatcttatctccaagt

SEQ ID NO: 7155 - protein, 7 aa, synthetic construct
  REGION 1..7: note = n-mer motif
SVNQAVT

SEQ ID NO: 7156 - DNA, 21 bp, synthetic construct
  misc_feature 1..21: note = n-mer motif encoding polynucleotide
  source 1..21: mol_type = other DNA
tctgtgaatcaggcggttacg

SEQ ID NO: 7157 - protein, 7 aa, synthetic construct
  REGION 1..7: note = n-mer motif
AHGERLS

SEQ ID NO: 7158 - DNA, 21 bp, synthetic construct
  misc_feature 1..21: note = n-mer motif encoding polynucleotide
  source 1..21: mol_type = other DNA
gctcacggagaaagacttagc

SEQ ID NO: 7159 - protein, 7 aa, synthetic construct
  REGION 1..7: note = n-mer motif
TLASSER

SEQ ID NO: 7160 - DNA, 21 bp, synthetic construct
  misc_feature 1..21: note = n-mer motif encoding polynucleotide
  source 1..21: mol_type = other DNA
actttggcgagttctgagcgg

SEQ ID NO: 7161 - protein, 7 aa, synthetic construct
  REGION 1..7: note = n-mer motif
VHDSTPL

SEQ ID NO: 7162 - DNA, 21 bp, synthetic construct
  misc_feature 1..21: note = n-mer motif encoding polynucleotide
  source 1..21: mol_type = other DNA
gtgcatgattcgactccgttg

SEQ ID NO: 7163 - protein, 7 aa, synthetic construct
  REGION 1..7: note = n-mer motif
HAAGASS

SEQ ID NO: 7164 - DNA, 21 bp, synthetic construct
  misc_feature 1..21: note = n-mer motif encoding polynucleotide
  source 1..21: mol_type = other DNA
catgcggcgggtgctagtagt

SEQ ID NO: 7165 - protein, 7 aa, synthetic construct
  REGION 1..7: note = n-mer motif
GNGTGVL

SEQ ID NO: 7166 - DNA, 21 bp, synthetic construct
  misc_feature 1..21: note = n-mer motif encoding polynucleotide
  source 1..21: mol_type = other DNA
ggaaacggcaccggggtccta

SEQ ID NO: 7167 - protein, 7 aa, synthetic construct
  REGION 1..7: note = n-mer motif
VLTSPGP

SEQ ID NO: 7168 - DNA, 21 bp, synthetic construct
  misc_feature 1..21: note = n-mer motif encoding polynucleotide
  source 1..21: mol_type = other DNA
gtgctcacaagcccgggaccg

SEQ ID NO: 7169 - protein, 7 aa, synthetic construct
  REGION 1..7: note = n-mer motif
LSTGAQM

SEQ ID NO: 7170 - DNA, 21 bp, synthetic construct
  misc_feature 1..21: note = n-mer motif encoding polynucleotide
  source 1..21: mol_type = other DNA
ttatcaaccggagctcaaatg

SEQ ID NO: 7171 - protein, 7 aa, synthetic construct
  REGION 1..7: note = n-mer motif
MIASGLS

SEQ ID NO: 7172 - DNA, 21 bp, synthetic construct
  misc_feature 1..21: note = n-mer motif encoding polynucleotide
  source 1..21: mol_type = other DNA
atgattgcgtcgggtttgtcg

SEQ ID NO: 7173 - protein, 7 aa, synthetic construct
  REGION 1..7: note = n-mer motif
RYDVEST

SEQ ID NO: 7174 - DNA, 21 bp, synthetic construct
  misc_feature 1..21: note = n-mer motif encoding polynucleotide
  source 1..21: mol_type = other DNA
cggtatgatgttgagtctacg

SEQ ID NO: 7175 - protein, 7 aa, synthetic construct
  REGION 1..7: note = n-mer motif
VLVGTSL

SEQ ID NO: 7176 - DNA, 21 bp, synthetic construct
  misc_feature 1..21: note = n-mer motif encoding polynucleotide
  source 1..21: mol_type = other DNA
gttcttgttgggacgagtttg

SEQ ID NO: 7177 - protein, 7 aa, synthetic construct
  REGION 1..7: note = n-mer motif
LNTTESK

SEQ ID NO: 7178 - DNA, 21 bp, synthetic construct
  misc_feature 1..21: note = n-mer motif encoding polynucleotide
  source 1..21: mol_type = other DNA
cttaacaccaccgaaagcaaa

SEQ ID NO: 7179 - protein, 7 aa, synthetic construct
  REGION 1..7: note = n-mer motif
SNIPTLM

SEQ ID NO: 7180 - DNA, 21 bp, synthetic construct
  misc_feature 1..21: note = n-mer motif encoding polynucleotide
  source 1..21: mol_type = other DNA
tcgaacatcccgacattaatg

SEQ ID NO: 7181 - protein, 7 aa, synthetic construct
  REGION 1..7: note = n-mer motif
VLGGPAV

SEQ ID NO: 7182 - DNA, 21 bp, synthetic construct
  misc_feature 1..21: note = n-mer motif encoding polynucleotide
  source 1..21: mol_type = other DNA
gtgctgggtggtcctgcggtg

SEQ ID NO: 7183 - protein, 7 aa, synthetic construct
  REGION 1..7: note = n-mer motif
VIGGLGI

SEQ ID NO: 7184 - DNA, 21 bp, synthetic construct
  misc_feature 1..21: note = n-mer motif encoding polynucleotide
  source 1..21: mol_type = other DNA
gttattggtgggcttgggatt

SEQ ID NO: 7185 - protein, 7 aa, synthetic construct
  REGION 1..7: note = n-mer motif
DLASAGH

SEQ ID NO: 7186 - DNA, 21 bp, synthetic construct
  misc_feature 1..21: note = n-mer motif encoding polynucleotide
  source 1..21: mol_type = other DNA
gatctggcgagtgctgggcat

SEQ ID NO: 7187 - protein, 7 aa, synthetic construct
  REGION 1..7: note = n-mer motif
SVTDIKH

SEQ ID NO: 7188 - DNA, 21 bp, synthetic construct
  misc_feature 1..21: note = n-mer motif encoding polynucleotide
  source 1..21: mol_type = other DNA
tcggtgacggacataaaacac

SEQ ID NO: 7189 - protein, 7 aa, synthetic construct
  REGION 1..7: note = n-mer motif
TNHQEPN

SEQ ID NO: 7190 - DNA, 21 bp, synthetic construct
  misc_feature 1..21: note = n-mer motif encoding polynucleotide
  source 1..21: mol_type = other DNA
acgaatcatcaggagcctaat

SEQ ID NO: 7191 - protein, 7 aa, synthetic construct
  REGION 1..7: note = n-mer motif
VLNEHVA

SEQ ID NO: 7192 - DNA, 21 bp, synthetic construct
  misc_feature 1..21: note = n-mer motif encoding polynucleotide
  source 1..21: mol_type = other DNA
gtccttaacgaacacgtagct

SEQ ID NO: 7193 - protein, 7 aa, synthetic construct
  REGION 1..7: note = n-mer motif
HNTGMDM

SEQ ID NO: 7194 - DNA, 21 bp, synthetic construct
  misc_feature 1..21: note = n-mer motif encoding polynucleotide
  source 1..21: mol_type = other DNA
cataatacggggatggatatg

SEQ ID NO: 7195 - protein, 7 aa, synthetic construct
  REGION 1..7: note = n-mer motif
GRSQLPM

SEQ ID NO: 7196 - DNA, 21 bp, synthetic construct
  misc_feature 1..21: note = n-mer motif encoding polynucleotide
  source 1..21: mol_type = other DNA
ggccgatcacaacttccaatg

SEQ ID NO: 7197 - protein, 7 aa, synthetic construct
  REGION 1..7: note = n-mer motif
DSGKDRT

SEQ ID NO: 7198 - DNA, 21 bp, synthetic construct
  misc_feature 1..21: note = n-mer motif encoding polynucleotide
  source 1..21: mol_type = other DNA
gattctggtaaggatcgtacg

SEQ ID NO: 7199 - protein, 7 aa, synthetic construct
  REGION 1..7: note = n-mer motif
LLAGISI

SEQ ID NO: 7200 - DNA, 21 bp, synthetic construct
  misc_feature 1..21: note = n-mer motif encoding polynucleotide
  source 1..21: mol_type = other DNA
ttgcttgctgggattagtatt

SEQ ID NO: 7201 - protein, 7 aa, synthetic construct
  REGION 1..7: note = n-mer motif
TDVVLHK

SEQ ID NO: 7202 - DNA, 21 bp, synthetic construct
  misc_feature 1..21: note = n-mer motif encoding polynucleotide
  source 1..21: mol_type = other DNA
actgacgtcgtattacacaaa

SEQ ID NO: 7203 - protein, 7 aa, synthetic construct
  REGION 1..7: note = n-mer motif
VIETRLS

SEQ ID NO: 7204 - DNA, 21 bp, synthetic construct
  misc_feature 1..21: note = n-mer motif encoding polynucleotide
  source 1..21: mol_type = other DNA
gtcatcgaaactcgcctttcc

SEQ ID NO: 7205 - protein, 7 aa, synthetic construct
  REGION 1..7: note = n-mer motif
FGAELHK

SEQ ID NO: 7206 - DNA, 21 bp, synthetic construct
  misc_feature 1..21: note = n-mer motif encoding polynucleotide
  source 1..21: mol_type = other DNA
tttggggctgagttgcataag

SEQ ID NO: 7207 - protein, 7 aa, synthetic construct
  REGION 1..7: note = n-mer motif
SHGTDSK

SEQ ID NO: 7208 - DNA, 21 bp, synthetic construct
  misc_feature 1..21: note = n-mer motif encoding polynucleotide
  source 1..21: mol_type = other DNA
agtcacggcacggactctaaa

SEQ ID NO: 7209 - protein, 7 aa, synthetic construct
  REGION 1..7: note = n-mer motif
AVDSSVR

SEQ ID NO: 7210 - DNA, 21 bp, synthetic construct
  misc_feature 1..21: note = n-mer motif encoding polynucleotide
  source 1..21: mol_type = other DNA
gctgttgactccagcgttaga

SEQ ID NO: 7211 - protein, 7 aa, synthetic construct
  REGION 1..7: note = n-mer motif
PNQGTLR

SEQ ID NO: 7212 - DNA, 21 bp, synthetic construct
  misc_feature 1..21: note = n-mer motif encoding polynucleotide
  source 1..21: mol_type = other DNA
cctaatcaggggacgcttcgg

SEQ ID NO: 7213 - protein, 7 aa, synthetic construct
  REGION 1..7: note = n-mer motif
VVSVTAS

SEQ ID NO: 7214 - DNA, 21 bp, synthetic construct
  misc_feature 1..21: note = n-mer motif encoding polynucleotide
  source 1..21: mol_type = other DNA
gtggtgtcggttacggctagt

SEQ ID NO: 7215 - protein, 7 aa, synthetic construct
  REGION 1..7: note = n-mer motif
VNVSYGD

SEQ ID NO: 7216 - DNA, 21 bp, synthetic construct
  misc_feature 1..21: note = n-mer motif encoding polynucleotide
  source 1..21: mol_type = other DNA
gtgaatgtttcgtatggtgat

SEQ ID NO: 7217 - protein, 7 aa, synthetic construct
  REGION 1..7: note = n-mer motif
VTTVYPV

SEQ ID NO: 7218 - DNA, 21 bp, synthetic construct
  misc_feature 1..21: note = n-mer motif encoding polynucleotide
  source 1..21: mol_type = other DNA
gttacgacagtatacccggta

SEQ ID NO: 7219 - protein, 7 aa, synthetic construct
  REGION 1..7: note = n-mer motif
QYVVSGA

SEQ ID NO: 7220 - DNA, 21 bp, synthetic construct
  misc_feature 1..21: note = n-mer motif encoding polynucleotide
  source 1..21: mol_type = other DNA
cagtatgttgttagtggtgcg

SEQ ID NO: 7221 - protein, 7 aa, synthetic construct
  REGION 1..7: note = n-mer motif
VLSGEVL

SEQ ID NO: 7222 - DNA, 21 bp, synthetic construct
  misc_feature 1..21: note = n-mer motif encoding polynucleotide
  source 1..21: mol_type = other DNA
gtcttgtctggagaagtcctt

SEQ ID NO: 7223 - protein, 7 aa, synthetic construct
  REGION 1..7: note = n-mer motif
AAGVILN

SEQ ID NO: 7224 - DNA, 21 bp, synthetic construct
  misc_feature 1..21: note = n-mer motif encoding polynucleotide
  source 1..21: mol_type = other DNA
gcggcgggtgttattctgaat

SEQ ID NO: 7225 - protein, 7 aa, synthetic construct
  REGION 1..7: note = n-mer motif
SMTSESS

SEQ ID NO: 7226 - DNA, 21 bp, synthetic construct
  misc_feature 1..21: note = n-mer motif encoding polynucleotide
  source 1..21: mol_type = other DNA
tcaatgacttcggaatcgtct

SEQ ID NO: 7227 - protein, 7 aa, synthetic construct
  REGION 1..7: note = n-mer motif
ILVDTHA

SEQ ID NO: 7228 - DNA, 21 bp, synthetic construct
  misc_feature 1..21: note = n-mer motif encoding polynucleotide
  source 1..21: mol_type = other DNA
attctggttgatactcatgcg

SEQ ID NO: 7229 - protein, 7 aa, synthetic construct
  REGION 1..7: note = n-mer motif
YVTFGEN

SEQ ID NO: 7230 - DNA, 21 bp, synthetic construct
  misc_feature 1..21: note = n-mer motif encoding polynucleotide
  source 1..21: mol_type = other DNA
tacgtaaccttcggtgaaaac

SEQ ID NO: 7231 - protein, 7 aa, synthetic construct
  REGION 1..7: note = n-mer motif
NSDLMGR

SEQ ID NO: 7232 - DNA, 21 bp, synthetic construct
  misc_feature 1..21: note = n-mer motif encoding polynucleotide
  source 1..21: mol_type = other DNA
aacagtgacctaatgggccga

SEQ ID NO: 7233 - protein, 7 aa, synthetic construct
  REGION 1..7: note = n-mer motif
IVDYQGK

SEQ ID NO: 7234 - DNA, 21 bp, synthetic construct
  misc_feature 1..21: note = n-mer motif encoding polynucleotide
  source 1..21: mol_type = other DNA
atcgtagactaccaaggcaaa

SEQ ID NO: 7235 - protein, 7 aa, synthetic construct
  REGION 1..7: note = n-mer motif
PHQGSES

SEQ ID NO: 7236 - DNA, 21 bp, synthetic construct
  misc_feature 1..21: note = n-mer motif encoding polynucleotide
  source 1..21: mol_type = other DNA
cctcatcagggtagtgagagt

SEQ ID NO: 7237 - protein, 7 aa, synthetic construct
  REGION 1..7: note = n-mer motif
LSRGEEK

SEQ ID NO: 7238 - DNA, 21 bp, synthetic construct
  misc_feature 1..21: note = n-mer motif encoding polynucleotide
  source 1..21: mol_type = other DNA
ctttcgaggggtgaggagaag

SEQ ID NO: 7239 - protein, 7 aa, synthetic construct
  REGION 1..7: note = n-mer motif
LSRDVAV

SEQ ID NO: 7240 - DNA, 21 bp, synthetic construct
  misc_feature 1..21: note = n-mer motif encoding polynucleotide
  source 1..21: mol_type = other DNA
ttgtcgagggatgtggcggtt

SEQ ID NO: 7241 - protein, 7 aa, synthetic construct
  REGION 1..7: note = n-mer motif
PTQGTLR

SEQ ID NO: 7242 - DNA, 21 bp, synthetic construct
  misc_feature 1..21: note = n-mer motif encoding polynucleotide
  source 1..21: mol_type = other DNA
ccaacgcaaggtaccttgcga

SEQ ID NO: 7243 - protein, 7 aa, synthetic construct
  REGION 1..7: note = n-mer motif
REQQKYW

SEQ ID NO: 7244 - DNA, 21 bp, synthetic construct
  misc_feature 1..21: note = n-mer motif encoding polynucleotide
  source 1..21: mol_type = other DNA
cgggaacaacaaaaatactgg

SEQ ID NO: 7245 - protein, 7 aa, synthetic construct
  REGION 1..7: note = n-mer motif
EQSMGSP

SEQ ID NO: 7246 - DNA, 21 bp, synthetic construct
  misc_feature 1..21: note = n-mer motif encoding polynucleotide
  source 1..21: mol_type = other DNA
gagcagtctatgggttctccg

SEQ ID NO: 7247 - protein, 7 aa, synthetic construct
  REGION 1..7: note = n-mer motif
KGSETPM

SEQ ID NO: 7248 - DNA, 21 bp, synthetic construct
  misc_feature 1..21: note = n-mer motif encoding polynucleotide
  source 1..21: mol_type = other DNA
aaagggtcagaaacaccgatg

SEQ ID NO: 7249 - protein, 7 aa, synthetic construct
  REGION 1..7: note = n-mer motif
KEYITAV

SEQ ID NO: 7250 - DNA, 21 bp, synthetic construct
  misc_feature 1..21: note = n-mer motif encoding polynucleotide
  source 1..21: mol_type = other DNA
aaagaatacataacagcggta

SEQ ID NO: 7251 - protein, 7 aa, synthetic construct
  REGION 1..7: note = n-mer motif
HGTLESQ

SEQ ID NO: 7252 - DNA, 21 bp, synthetic construct
  misc_feature 1..21: note = n-mer motif encoding polynucleotide
  source 1..21: mol_type = other DNA
cacggcaccctcgaatcgcaa

SEQ ID NO: 7253 - protein, 7 aa, synthetic construct
  REGION 1..7: note = n-mer motif
ESLAGVR

SEQ ID NO: 7254 - DNA, 21 bp, synthetic construct
  misc_feature 1..21: note = n-mer motif encoding polynucleotide
  source 1..21: mol_type = other DNA
gagagtcttgctggtgttagg

SEQ ID NO: 7255 - protein, 7 aa, synthetic construct
  REGION 1..7: note = n-mer motif
NDRNTSS

SEQ ID NO: 7256 - DNA, 21 bp, synthetic construct
  misc_feature 1..21: note = n-mer motif encoding polynucleotide
  source 1..21: mol_type = other DNA
aatgataggaatacgtcttcg

SEQ ID NO: 7257 - protein, 7 aa, synthetic construct
  REGION 1..7: note = n-mer motif
AAVSALL

SEQ ID NO: 7258 - DNA, 21 bp, synthetic construct
  misc_feature 1..21: note = n-mer motif encoding polynucleotide
  source 1..21: mol_type = other DNA
gccgcagtatccgcactatta

SEQ ID NO: 7259 - protein, 7 aa, synthetic construct
  REGION 1..7: note = n-mer motif
LRVTENP

SEQ ID NO: 7260 - DNA, 21 bp, synthetic construct
  misc_feature 1..21: note = n-mer motif encoding polynucleotide
  source 1..21: mol_type = other DNA
cttcgggtcaccgaaaacccc

SEQ ID NO: 7261 - protein, 7 aa, synthetic construct
  REGION 1..7: note = n-mer motif
IAILAAS

SEQ ID NO: 7262 - DNA, 21 bp, synthetic construct
  misc_feature 1..21: note = n-mer motif encoding polynucleotide
  source 1..21: mol_type = other DNA
attgcgattcttgctgcttcg

SEQ ID NO: 7263 - protein, 7 aa, synthetic construct
  REGION 1..7: note = n-mer motif
MLTGIAT

SEQ ID NO: 7264 - DNA, 21 bp, synthetic construct
  misc_feature 1..21: note = n-mer motif encoding polynucleotide
  source 1..21: mol_type = other DNA
atgttgacggggattgctact

SEQ ID NO: 7265 - protein, 7 aa, synthetic construct
  REGION 1..7: note = n-mer motif
STIPALM

SEQ ID NO: 7266 - DNA, 21 bp, synthetic construct
  misc_feature 1..21: note = n-mer motif encoding polynucleotide
  source 1..21: mol_type = other DNA
agtactattcctgctctgatg

SEQ ID NO: 7267 - protein, 7 aa, synthetic construct
  REGION 1..7: note = n-mer motif
AAREVIN

SEQ ID NO: 7268 - DNA, 21 bp, synthetic construct
  misc_feature 1..21: note = n-mer motif encoding polynucleotide
  source 1..21: mol_type = other DNA
gcggctcgggaggtgattaat

SEQ ID NO: 7269 - protein, 7 aa, synthetic construct
  REGION 1..7: note = n-mer motif
IVMAEVH

SEQ ID NO: 7270 - DNA, 21 bp, synthetic construct
  misc_feature 1..21: note = n-mer motif encoding polynucleotide
  source 1..21: mol_type = other DNA
atcgtaatggccgaagtacac

SEQ ID NO: 7271 - protein, 7 aa, synthetic construct
  REGION 1..7: note = n-mer motif
LVVDASR

SEQ ID NO: 7272 - DNA, 21 bp, synthetic construct
  misc_feature 1..21: note = n-mer motif encoding polynucleotide
  source 1..21: mol_type = other DNA
ttggtagtagacgcaagtcgc

SEQ ID NO: 7273 - protein, 7 aa, synthetic construct
  REGION 1..7: note = n-mer motif
HQHMVEG

SEQ ID NO: 7274 - DNA, 21 bp, synthetic construct
  misc_feature 1..21: note = n-mer motif encoding polynucleotide
  source 1..21: mol_type = other DNA
caccaacacatggttgaagga

SEQ ID NO: 7275 - protein, 7 aa, synthetic construct
  REGION 1..7: note = n-mer motif
ENSGGHF

SEQ ID NO: 7276 - DNA, 21 bp, synthetic construct
  misc_feature 1..21: note = n-mer motif encoding polynucleotide
  source 1..21: mol_type = other DNA
gagaatagtgggggtcatttt

SEQ ID NO: 7277 - protein, 7 aa, synthetic construct
  REGION 1..7: note = n-mer motif
YSMTVTT

SEQ ID NO: 7278 - DNA, 21 bp, synthetic construct
  misc_feature 1..21: note = n-mer motif encoding polynucleotide
  source 1..21: mol_type = other DNA
tatagtatgacggttacgact

SEQ ID NO: 7279 - protein, 7 aa, synthetic construct
  REGION 1..7: note = n-mer motif
SHASDSK

SEQ ID NO: 7280 - DNA, 21 bp, synthetic construct
  misc_feature 1..21: note = n-mer motif encoding polynucleotide
  source 1..21: mol_type = other DNA
tcgcacgcatcagactctaaa

SEQ ID NO: 7281 - protein, 7 aa, synthetic construct
  REGION 1..7: note = n-mer motif
AVSDYTV

SEQ ID NO: 7282 - DNA, 21 bp, synthetic construct
  misc_feature 1..21: note = n-mer motif encoding polynucleotide
  source 1..21: mol_type = other DNA
gccgtgagcgactacacagtc

SEQ ID NO: 7283 - protein, 7 aa, synthetic construct
  REGION 1..7: note = n-mer motif
STIPTLL

SEQ ID NO: 7284 - DNA, 21 bp, synthetic construct
  misc_feature 1..21: note = n-mer motif encoding polynucleotide
  source 1..21: mol_type = other DNA
agtactattcctactctgttg

SEQ ID NO: 7285 - protein, 7 aa, synthetic construct
  REGION 1..7: note = n-mer motif
SPSAFPK

SEQ ID NO: 7286 - DNA, 21 bp, synthetic construct
  misc_feature 1..21: note = n-mer motif encoding polynucleotide
  source 1..21: mol_type = other DNA
tccccttcagcattcccaaaa

SEQ ID NO: 7287 - protein, 7 aa, synthetic construct
  REGION 1..7: note = n-mer motif
NFGEVQL

SEQ ID NO: 7288 - DNA, 21 bp, synthetic construct
  misc_feature 1..21: note = n-mer motif encoding polynucleotide
  source 1..21: mol_type = other DNA
aattttggtgaggttcagctg

SEQ ID NO: 7289 - protein, 7 aa, synthetic construct
  REGION 1..7: note = n-mer motif
GIETRGL

SEQ ID NO: 7290 - DNA, 21 bp, synthetic construct
  misc_feature 1..21: note = n-mer motif encoding polynucleotide
  source 1..21: mol_type = other DNA
ggaatcgaaacacgcggtctc

SEQ ID NO: 7291 - protein, 7 aa, synthetic construct
  REGION 1..7: note = n-mer motif
NVNQDSL

SEQ ID NO: 7292 - DNA, 21 bp, synthetic construct
  misc_feature 1..21: note = n-mer motif encoding polynucleotide
  source 1..21: mol_type = other DNA
aacgtaaaccaagactcactc

SEQ ID NO: 7293 - protein, 7 aa, synthetic construct
  REGION 1..7: note = n-mer motif
AGLLTKV

SEQ ID NO: 7294 - DNA, 21 bp, synthetic construct
  misc_feature 1..21: note = n-mer motif encoding polynucleotide
  source 1..21: mol_type = other DNA
gcaggactccttacaaaagta

SEQ ID NO: 7295 - protein, 7 aa, synthetic construct
  REGION 1..7: note = n-mer motif
LSIRQGP

SEQ ID NO: 7296 - DNA, 21 bp, synthetic construct
  misc_feature 1..21: note = n-mer motif encoding polynucleotide
  source 1..21: mol_type = other DNA
ttgagtattcgtcagggtcct

SEQ ID NO: 7297 - protein, 7 aa, synthetic construct
  REGION 1..7: note = n-mer motif
PALQGNF

SEQ ID NO: 7298 - DNA, 21 bp, synthetic construct
  misc_feature 1..21: note = n-mer motif encoding polynucleotide
  source 1..21: mol_type = other DNA
ccggctcttcagggtaatttt

SEQ ID NO: 7299 - protein, 7 aa, synthetic construct
  REGION 1..7: note = n-mer motif
LDSGIPR

SEQ ID NO: 7300 - DNA, 21 bp, synthetic construct
  misc_feature 1..21: note = n-mer motif encoding polynucleotide
  source 1..21: mol_type = other DNA
ctcgactctggtatccccaga

SEQ ID NO: 7301 - protein, 7 aa, synthetic construct
  REGION 1..7: note = n-mer motif
SYSDGSS

SEQ ID NO: 7302 - DNA, 21 bp, synthetic construct
  misc_feature 1..21: note = n-mer motif encoding polynucleotide
  source 1..21: mol_type = other DNA
tcatactcggacggcagcagc

SEQ ID NO: 7303 - protein, 7 aa, synthetic construct
  REGION 1..7: note = n-mer motif
FQDTIGV

SEQ ID NO: 7304 - DNA, 21 bp, synthetic construct
  misc_feature 1..21: note = n-mer motif encoding polynucleotide
  source 1..21: mol_type = other DNA
tttcaggatacgattggggtg

SEQ ID NO: 7305 - protein, 7 aa, synthetic construct
  REGION 1..7: note = n-mer motif
VLLGIDR

SEQ ID NO: 7306 - DNA, 21 bp, synthetic construct
  misc_feature 1..21: note = n-mer motif encoding polynucleotide
  source 1..21: mol_type = other DNA
gttttgctaggaatcgaccgt

SEQ ID NO: 7307 - protein, 7 aa, synthetic construct
  REGION 1..7: note = n-mer motif
SHGYDSK

SEQ ID NO: 7308 - DNA, 21 bp, synthetic construct
  misc_feature 1..21: note = n-mer motif encoding polynucleotide
  source 1..21: mol_type = other DNA
tctcatggttatgattcgaag

SEQ ID NO: 7309 - protein, 7 aa, synthetic construct
  REGION 1..7: note = n-mer motif
SVDTGLL

SEQ ID NO: 7310 - DNA, 21 bp, synthetic construct
  misc_feature 1..21: note = n-mer motif encoding polynucleotide
  source 1..21: mol_type = other DNA
agcgtcgacacgggcctctta

SEQ ID NO: 7311 - protein, 7 aa, synthetic construct
  REGION 1..7: note = n-mer motif
EGGGAQR

SEQ ID NO: 7312 - DNA, 21 bp, synthetic construct
  misc_feature 1..21: note = n-mer motif encoding polynucleotide
  source 1..21: mol_type = other DNA
gaggggggtggggctcagagg

SEQ ID NO: 7313 - protein, 7 aa, synthetic construct
  REGION 1..7: note = n-mer motif
AALSQEF

SEQ ID NO: 7314 - DNA, 21 bp, synthetic construct
  misc_feature 1..21: note = n-mer motif encoding polynucleotide
  source 1..21: mol_type = other DNA
gcggccctgtctcaagaattc

SEQ ID NO: 7315 - protein, 7 aa, synthetic construct
  REGION 1..7: note = n-mer motif
NSISLIN

SEQ ID NO: 7316 - DNA, 21 bp, synthetic construct
  misc_feature 1..21: note = n-mer motif encoding polynucleotide
  source 1..21: mol_type = other DNA
aactctatcagcctcataaac

SEQ ID NO: 7317 - protein, 7 aa, synthetic construct
  REGION 1..7: note = n-mer motif
LSRGEEM

SEQ ID NO: 7318 - DNA, 21 bp, synthetic construct
  misc_feature 1..21: note = n-mer motif encoding polynucleotide
  source 1..21: mol_type = other DNA
ctttcgaggggtgaggagatg

SEQ ID NO: 7319 - protein, 7 aa, synthetic construct
  REGION 1..7: note = n-mer motif
IGMSAST

SEQ ID NO: 7320 - DNA, 21 bp, synthetic construct
  misc_feature 1..21: note = n-mer motif encoding polynucleotide
  source 1..21: mol_type = other DNA
ataggtatgagcgcgtccacc

SEQ ID NO: 7321 - protein, 7 aa, synthetic construct
  REGION 1..7: note = n-mer motif
MGSDTTM

SEQ ID NO: 7322 - DNA, 21 bp, synthetic construct
  misc_feature 1..21: note = n-mer motif encoding polynucleotide
  source 1..21: mol_type = other DNA
atgggttctgatactactatg

SEQ ID NO: 7323 - protein, 7 aa, synthetic construct
  REGION 1..7: note = n-mer motif
SLVLTSH

SEQ ID NO: 7324 - DNA, 21 bp, synthetic construct
  misc_feature 1..21: note = n-mer motif encoding polynucleotide
  source 1..21: mol_type = other DNA
tcattagtccttacgagccac

SEQ ID NO: 7325 - protein, 7 aa, synthetic construct
  REGION 1..7: note = n-mer motif
LGGDAVA

SEQ ID NO: 7326 - DNA, 21 bp, synthetic construct
  misc_feature 1..21: note = n-mer motif encoding polynucleotide
  source 1..21: mol_type = other DNA
ctaggaggagacgcagttgca

SEQ ID NO: 7327 - protein, 7 aa, synthetic construct
  REGION 1..7: note = n-mer motif
PIQGTLR

SEQ ID NO: 7328 - DNA, 21 bp, synthetic construct
  misc_feature 1..21: note = n-mer motif encoding polynucleotide
  source 1..21: mol_type = other DNA
cctattcaggggacgcttcgg

SEQ ID NO: 7329 - protein, 7 aa, synthetic construct
  REGION 1..7: note = n-mer motif
RVELALT

SEQ ID NO: 7330 - DNA, 21 bp, synthetic construct
  misc_feature 1..21: note = n-mer motif encoding polynucleotide
  source 1..21: mol_type = other DNA
agagtcgaacttgccttaaca

SEQ ID NO: 7331 - protein, 7 aa, synthetic construct
  REGION 1..7: note = n-mer motif
VDHGGVH

SEQ ID NO: 7332 - DNA, 21 bp, synthetic construct
  misc_feature 1..21: note = n-mer motif encoding polynucleotide
  source 1..21: mol_type = other DNA
gttgaccacggaggggtccac

SEQ ID NO: 7333 - protein, 7 aa, synthetic construct
  REGION 1..7: note = n-mer motif
IASDIGR

SEQ ID NO: 7334 - DNA, 21 bp, synthetic construct
  misc_feature 1..21: note = n-mer motif encoding polynucleotide
  source 1..21: mol_type = other DNA
attgcttcggatattggtcgg

SEQ ID NO: 7335 - protein, 7 aa, synthetic construct
  REGION 1..7: note = n-mer motif
PNERLAV

SEQ ID NO: 7336 - DNA, 21 bp, synthetic construct
  misc_feature 1..21: note = n-mer motif encoding polynucleotide
  source 1..21: mol_type = other DNA
cctaacgaacgattggcagtc

SEQ ID NO: 7337 - protein, 7 aa, synthetic construct
  REGION 1..7: note = n-mer motif
DLSTFPV

SEQ ID NO: 7338 - DNA, 21 bp, synthetic construct
  misc_feature 1..21: note = n-mer motif encoding polynucleotide
  source 1..21: mol_type = other DNA
gacctctcgacattccctgta

SEQ ID NO: 7339 - protein, 7 aa, synthetic construct
  REGION 1..7: note = n-mer motif
DSSKAEW

SEQ ID NO: 7340 - DNA, 21 bp, synthetic construct
  misc_feature 1..21: note = n-mer motif encoding polynucleotide
  source 1..21: mol_type = other DNA
gatagtagtaaggctgagtgg

SEQ ID NO: 7341 - protein, 7 aa, synthetic construct
  REGION 1..7: note = n-mer motif
GAFAPAT

SEQ ID NO: 7342 - DNA, 21 bp, synthetic construct
  misc_feature 1..21: note = n-mer motif encoding polynucleotide
  source 1..21: mol_type = other DNA
ggcgcattcgcaccagcaaca

SEQ ID NO: 7343 - protein, 7 aa, synthetic construct
  REGION 1..7: note = n-mer motif
TMSLSLR

SEQ ID NO: 7344 - DNA, 21 bp, synthetic construct
  misc_feature 1..21: note = n-mer motif encoding polynucleotide
  source 1..21: mol_type = other DNA
actatgtctctgtcgttgcgt

SEQ ID NO: 7345 - protein, 7 aa, synthetic construct
  REGION 1..7: note = n-mer motif
VDDIKSW

SEQ ID NO: 7346 - DNA, 21 bp, synthetic construct
  misc_feature 1..21: note = n-mer motif encoding polynucleotide
  source 1..21: mol_type = other DNA
gttgacgacataaaatcctgg

SEQ ID NO: 7347 - protein, 7 aa, synthetic construct
  REGION 1..7: note = n-mer motif
TTLADHA

SEQ ID NO: 7348 - DNA, 21 bp, synthetic construct
  misc_feature 1..21: note = n-mer motif encoding polynucleotide
  source 1..21: mol_type = other DNA
actactctggctgatcatgcg

SEQ ID NO: 7349 - protein, 7 aa, synthetic construct
  REGION 1..7: note = n-mer motif
KSDVEYL

SEQ ID NO: 7350 - DNA, 21 bp, synthetic construct
  misc_feature 1..21: note = n-mer motif encoding polynucleotide
  source 1..21: mol_type = other DNA
aaatcagacgtcgaataccta

SEQ ID NO: 7351 - protein, 7 aa, synthetic construct
  REGION 1..7: note = n-mer motif
MNGGYVL

SEQ ID NO: 7352 - DNA, 21 bp, synthetic construct
  misc_feature 1..21: note = n-mer motif encoding polynucleotide
  source 1..21: mol_type = other DNA
atgaacggcggatacgtactt

SEQ ID NO: 7353 - protein, 7 aa, synthetic construct
  REGION 1..7: note = n-mer motif
MAVDVTK

SEQ ID NO: 7354 - DNA, 21 bp, synthetic construct
  misc_feature 1..21: note = n-mer motif encoding polynucleotide
  source 1..21: mol_type = other DNA
atggcagtcgacgtaaccaaa

SEQ ID NO: 7355 - protein, 7 aa, synthetic construct
  REGION 1..7: note = n-mer motif
TDALTSK

SEQ ID NO: 7356 - DNA, 21 bp, synthetic construct
  misc_feature 1..21: note = n-mer motif encoding polynucleotide
  source 1..21: mol_type = other DNA
acagacgcactcaccagtaaa

SEQ ID NO: 7357 - protein, 7 aa, synthetic construct
  REGION 1..7: note = n-mer motif
AAGGILN

SEQ ID NO: 7358 - DNA, 21 bp, synthetic construct
  misc_feature 1..21: note = n-mer motif encoding polynucleotide
  source 1..21: mol_type = other DNA
gcggcgggtggtattctgaat

SEQ ID NO: 7359 - protein, 7 aa, synthetic construct
  REGION 1..7: note = n-mer motif
LSEGRAY

SEQ ID NO: 7360 - DNA, 21 bp, synthetic construct
  misc_feature 1..21: note = n-mer motif encoding polynucleotide
  source 1..21: mol_type = other DNA
cttagtgagggtcgtgcgtat

SEQ ID NO: 7361 - protein, 7 aa, synthetic construct
  REGION 1..7: note = n-mer motif
SVSHVVV

SEQ ID NO: 7362 - DNA, 21 bp, synthetic construct
  misc_feature 1..21: note = n-mer motif encoding polynucleotide
  source 1..21: mol_type = other DNA
tcggtctctcacgtcgtcgta

SEQ ID NO: 7363 - protein, 7 aa, synthetic construct
  REGION 1..7: note = n-mer motif
FISGALT

SEQ ID NO: 7364 - DNA, 21 bp, synthetic construct
  misc_feature 1..21: note = n-mer motif encoding polynucleotide
  source 1..21: mol_type = other DNA
ttcatatccggcgccttaact

SEQ ID NO: 7365 - protein, 7 aa, synthetic construct
  REGION 1..7: note = n-mer motif
VTGLTVQ

SEQ ID NO: 7366 - DNA, 21 bp, synthetic construct
  misc_feature 1..21: note = n-mer motif encoding polynucleotide
  source 1..21: mol_type = other DNA
gttaccgggctgacagtacaa

SEQ ID NO: 7367 - protein, 7 aa, synthetic construct
  REGION 1..7: note = n-mer motif
HSASLIE

SEQ ID NO: 7368 - DNA, 21 bp, synthetic construct
  misc_feature 1..21: note = n-mer motif encoding polynucleotide
  source 1..21: mol_type = other DNA
cactcagcatccctcatagaa

SEQ ID NO: 7369 - protein, 7 aa, synthetic construct
  REGION 1..7: note = n-mer motif
ITQAVYI

SEQ ID NO: 7370 - DNA, 21 bp, synthetic construct
  misc_feature 1..21: note = n-mer motif encoding polynucleotide
  source 1..21: mol_type = other DNA
atcacacaagcggtatacatc

SEQ ID NO: 7371 - protein, 7 aa, synthetic construct
  REGION 1..7: note = n-mer motif
ASMSAEH

SEQ ID NO: 7372 - DNA, 21 bp, synthetic construct
  misc_feature 1..21: note = n-mer motif encoding polynucleotide
  source 1..21: mol_type = other DNA
gctagtatgtctgcggagcat

SEQ ID NO: 7373 - protein, 7 aa, synthetic construct
  REGION 1..7: note = n-mer motif
SVTDVNH

SEQ ID NO: 7374 - DNA, 21 bp, synthetic construct
  misc_feature 1..21: note = n-mer motif encoding polynucleotide
  source 1..21: mol_type = other DNA
tctgttactgatgttaatcat

SEQ ID NO: 7375 - protein, 7 aa, synthetic construct
  REGION 1..7: note = n-mer motif
LGTSDVR

SEQ ID NO: 7376 - DNA, 21 bp, synthetic construct
  misc_feature 1..21: note = n-mer motif encoding polynucleotide
  source 1..21: mol_type = other DNA
ttggggacgagtgatgtgcgt

SEQ ID NO: 7377 - protein, 7 aa, synthetic construct
  REGION 1..7: note = n-mer motif
QSNHAPV

SEQ ID NO: 7378 - DNA, 21 bp, synthetic construct
  misc_feature 1..21: note = n-mer motif encoding polynucleotide
  source 1..21: mol_type = other DNA
caatcaaaccacgccccggtc

SEQ ID NO: 7379 - protein, 7 aa, synthetic construct
  REGION 1..7: note = n-mer motif
SMAVTAK

SEQ ID NO: 7380 - DNA, 21 bp, synthetic construct
  misc_feature 1..21: note = n-mer motif encoding polynucleotide
  source 1..21: mol_type = other DNA
agtatggcggtgacggcgaag

SEQ ID NO: 7381 - protein, 7 aa, synthetic construct
  REGION 1..7: note = n-mer motif
RMTGDLT

SEQ ID NO: 7382 - DNA, 21 bp, synthetic construct
  misc_feature 1..21: note = n-mer motif encoding polynucleotide
  source 1..21: mol_type = other DNA
cgtatgactggagacctaacc

SEQ ID NO: 7383 - protein, 7 aa, synthetic construct
  REGION 1..7: note = n-mer motif
SHGSDPK

SEQ ID NO: 7384 - DNA, 21 bp, synthetic construct
  misc_feature 1..21: note = n-mer motif encoding polynucleotide
  source 1..21: mol_type = other DNA
agccacgggtcagaccctaaa

SEQ ID NO: 7385 - protein, 7 aa, synthetic construct
  REGION 1..7: note = n-mer motif
GLGDSGE

SEQ ID NO: 7386 - DNA, 21 bp, synthetic construct
  misc_feature 1..21: note = n-mer motif encoding polynucleotide
  source 1..21: mol_type = other DNA
gggttgggggattcgggtgag

SEQ ID NO: 7387 - protein, 7 aa, synthetic construct
  REGION 1..7: note = n-mer motif
SVTLLGV

SEQ ID NO: 7388 - DNA, 21 bp, synthetic construct
  misc_feature 1..21: note = n-mer motif encoding polynucleotide
  source 1..21: mol_type = other DNA
agtgtgactctgttgggtgtg

SEQ ID NO: 7389 - protein, 7 aa, synthetic construct
  REGION 1..7: note = n-mer motif
PNDGPSK

SEQ ID NO: 7390 - DNA, 21 bp, synthetic construct
  misc_feature 1..21: note = n-mer motif encoding polynucleotide
  source 1..21: mol_type = other DNA
cctaatgatgggcctagtaag

SEQ ID NO: 7391 - protein, 7 aa, synthetic construct
  REGION 1..7: note = n-mer motif
FDSAPRY

SEQ ID NO: 7392 - DNA, 21 bp, synthetic construct
  misc_feature 1..21: note = n-mer motif encoding polynucleotide
  source 1..21: mol_type = other DNA
tttgattctgcgccgcggtat

SEQ ID NO: 7393 - protein, 7 aa, synthetic construct
  REGION 1..7: note = n-mer motif
VVDAYNL

SEQ ID NO: 7394 - DNA, 21 bp, synthetic construct
  misc_feature 1..21: note = n-mer motif encoding polynucleotide
  source 1..21: mol_type = other DNA
gtcgtagacgcttacaactta

SEQ ID NO: 7395 - protein, 7 aa, synthetic construct
  REGION 1..7: note = n-mer motif
NEAVNVR

SEQ ID NO: 7396 - DNA, 21 bp, synthetic construct
  misc_feature 1..21: note = n-mer motif encoding polynucleotide
  source 1..21: mol_type = other DNA
aatgaggctgttaatgttcgg

SEQ ID NO: 7397 - protein, 7 aa, synthetic construct
  REGION 1..7: note = n-mer motif
TLALSER

SEQ ID NO: 7398 - DNA, 21 bp, synthetic construct
  misc_feature 1..21: note = n-mer motif encoding polynucleotide
  source 1..21: mol_type = other DNA
accttagccttatcagaacga

SEQ ID NO: 7399 - protein, 7 aa, synthetic construct
  REGION 1..7: note = n-mer motif
LRDSAEP

SEQ ID NO: 7400 - DNA, 21 bp, synthetic construct
  misc_feature 1..21: note = n-mer motif encoding polynucleotide
  source 1..21: mol_type = other DNA
ctccgagactcagcggaacca

SEQ ID NO: 7401 - protein, 7 aa, synthetic construct
  REGION 1..7: note = n-mer motif
PDNNPRN

SEQ ID NO: 7402 - DNA, 21 bp, synthetic construct
  misc_feature 1..21: note = n-mer motif encoding polynucleotide
  source 1..21: mol_type = other DNA
cctgataataatccgcggaat

SEQ ID NO: 7403 - protein, 7 aa, synthetic construct
  REGION 1..7: note = n-mer motif
YHASDSK

SEQ ID NO: 7404 - DNA, 21 bp, synthetic construct
  misc_feature 1..21: note = n-mer motif encoding polynucleotide
  source 1..21: mol_type = other DNA
tatcatgcttctgattcgaag

SEQ ID NO: 7405 - protein, 7 aa, synthetic construct
  REGION 1..7: note = n-mer motif
KGYDTNM

SEQ ID NO: 7406 - DNA, 21 bp, synthetic construct
  misc_feature 1..21: note = n-mer motif encoding polynucleotide
  source 1..21: mol_type = other DNA
aaaggctacgacacaaacatg

SEQ ID NO: 7407 - protein, 7 aa, synthetic construct
  REGION 1..7: note = n-mer motif
HTTGAEM

SEQ ID NO: 7408 - DNA, 21 bp, synthetic construct
  misc_feature 1..21: note = n-mer motif encoding polynucleotide
  source 1..21: mol_type = other DNA
cacactactggggccgaaatg

SEQ ID NO: 7409 - protein, 7 aa, synthetic construct
  REGION 1..7: note = n-mer motif
GLNDNVA

SEQ ID NO: 7410 - DNA, 21 bp, synthetic construct
  misc_feature 1..21: note = n-mer motif encoding polynucleotide
  source 1..21: mol_type = other DNA
ggtctgaatgataatgtggcg

SEQ ID NO: 7411 - protein, 7 aa, synthetic construct
  REGION 1..7: note = n-mer motif
PQLIVPK

SEQ ID NO: 7412 - DNA, 21 bp, synthetic construct
  misc_feature 1..21: note = n-mer motif encoding polynucleotide
  source 1..21: mol_type = other DNA
cctcagcttattgttcctaag

SEQ ID NO: 7413 - protein, 7 aa, synthetic construct
  REGION 1..7: note = n-mer motif
IIVDNGS

SEQ ID NO: 7414 - DNA, 21 bp, synthetic construct
  misc_feature 1..21: note = n-mer motif encoding polynucleotide
  source 1..21: mol_type = other DNA
ataatagtcgacaacggatca

SEQ ID NO: 7415 - protein, 7 aa, synthetic construct
  REGION 1..7: note = n-mer motif
QNESGMK

SEQ ID NO: 7416 - DNA, 21 bp, synthetic construct
  misc_feature 1..21: note = n-mer motif encoding polynucleotide
  source 1..21: mol_type = other DNA
caaaacgaaagcgggatgaaa

SEQ ID NO: 7417 - protein, 7 aa, synthetic construct
  REGION 1..7: note = n-mer motif
NQLGELV

SEQ ID NO: 7418 - DNA, 21 bp, synthetic construct
  misc_feature 1..21: note = n-mer motif encoding polynucleotide
  source 1..21: mol_type = other DNA
aaccaactcggcgaactagtg

SEQ ID NO: 7419 - protein, 7 aa, synthetic construct
  REGION 1..7: note = n-mer motif
RDLTSDM

SEQ ID NO: 7420 - DNA, 21 bp, synthetic construct
  misc_feature 1..21: note = n-mer motif encoding polynucleotide
  source 1..21: mol_type = other DNA
agagacttgacttcggacatg

SEQ ID NO: 7421 - protein, 7 aa, synthetic construct
  REGION 1..7: note = n-mer motif
GVSVLNV

SEQ ID NO: 7422 - DNA, 21 bp, synthetic construct
  misc_feature 1..21: note = n-mer motif encoding polynucleotide
  source 1..21: mol_type = other DNA
ggggtgagtgtgctgaatgtt

SEQ ID NO: 7423 - protein, 7 aa, synthetic construct
  REGION 1..7: note = n-mer motif
AADSSGR

SEQ ID NO: 7424 - DNA, 21 bp, synthetic construct
  misc_feature 1..21: note = n-mer motif encoding polynucleotide
  source 1..21: mol_type = other DNA
gcggcggatagttctgggcgg

SEQ ID NO: 7425 - protein, 7 aa, synthetic construct
  REGION 1..7: note = n-mer motif
ALNEHEA

SEQ ID NO: 7426 - DNA, 21 bp, synthetic construct
  misc_feature 1..21: note = n-mer motif encoding polynucleotide
  source 1..21: mol_type = other DNA
gctctgaatgagcatgaggcg

SEQ ID NO: 7427 - protein, 7 aa, synthetic construct
  REGION 1..7: note = n-mer motif
LRVTENQ

SEQ ID NO: 7428 - DNA, 21 bp, synthetic construct
  misc_feature 1..21: note = n-mer motif encoding polynucleotide
  source 1..21: mol_type = other DNA
ttgcgtgtgacggagaatcag

SEQ ID NO: 7429 - protein, 7 aa, synthetic construct
  REGION 1..7: note = n-mer motif
MTVPGSP

SEQ ID NO: 7430 - DNA, 21 bp, synthetic construct
  misc_feature 1..21: note = n-mer motif encoding polynucleotide
  source 1..21: mol_type = other DNA
atgacggttccgggtagtccg

SEQ ID NO: 7431 - protein, 7 aa, synthetic construct
  REGION 1..7: note = n-mer motif
TLAITER

SEQ ID NO: 7432 - DNA, 21 bp, synthetic construct
  misc_feature 1..21: note = n-mer motif encoding polynucleotide
  source 1..21: mol_type = other DNA
actttggcgattactgagcgg

SEQ ID NO: 7433 - protein, 7 aa, synthetic construct
  REGION 1..7: note = n-mer motif
KNPGVDT

SEQ ID NO: 7434 - DNA, 21 bp, synthetic construct
  misc_feature 1..21: note = n-mer motif encoding polynucleotide
  source 1..21: mol_type = other DNA
aagaatccgggggtggatact

SEQ ID NO: 7435 - protein, 7 aa, synthetic construct
  REGION 1..7: note = n-mer motif
RVALDET

SEQ ID NO: 7436 - DNA, 21 bp, synthetic construct
  misc_feature 1..21: note = n-mer motif encoding polynucleotide
  source 1..21: mol_type = other DNA
agggtggcgctggatgagacg

SEQ ID NO: 7437 - protein, 7 aa, synthetic construct
  REGION 1..7: note = n-mer motif
MNVGHVL

SEQ ID NO: 7438 - DNA, 21 bp, synthetic construct
  misc_feature 1..21: note = n-mer motif encoding polynucleotide
  source 1..21: mol_type = other DNA
atgaatgtgggtcatgttctg

SEQ ID NO: 7439 - protein, 7 aa, synthetic construct
  REGION 1..7: note = n-mer motif
LRVTENK

SEQ ID NO: 7440 - DNA, 21 bp, synthetic construct
  misc_feature 1..21: note = n-mer motif encoding polynucleotide
  source 1..21: mol_type = other DNA
ttgcgtgtgacggagaataag

SEQ ID NO: 7441 - protein, 7 aa, synthetic construct
  REGION 1..7: note = n-mer motif
TLGMSTR

SEQ ID NO: 7442 - DNA, 21 bp, synthetic construct
  misc_feature 1..21: note = n-mer motif encoding polynucleotide
  source 1..21: mol_type = other DNA
acgttggggatgtctactcgt

SEQ ID NO: 7443 - protein, 7 aa, synthetic construct
  REGION 1..7: note = n-mer motif
REHSAQL

SEQ ID NO: 7444 - DNA, 21 bp, synthetic construct
  misc_feature 1..21: note = n-mer motif encoding polynucleotide
  source 1..21: mol_type = other DNA
agggagcattcggcgcagctt

SEQ ID NO: 7445 - protein, 7 aa, synthetic construct
  REGION 1..7: note = n-mer motif
HGNLVSQ

SEQ ID NO: 7446 - DNA, 21 bp, synthetic construct
  misc_feature 1..21: note = n-mer motif encoding polynucleotide
  source 1..21: mol_type = other DNA
catgggaatttggtgtctcag

SEQ ID NO: 7447 - protein, 7 aa, synthetic construct
  REGION 1..7: note = n-mer motif
VQGPQTG

SEQ ID NO: 7448 - DNA, 21 bp, synthetic construct
  misc_feature 1..21: note = n-mer motif encoding polynucleotide
  source 1..21: mol_type = other DNA
gtgcagggtccgcagactggt

SEQ ID NO: 7449 - protein, 7 aa, synthetic construct
  REGION 1..7: note = n-mer motif
VTTLTPV

SEQ ID NO: 7450 - DNA, 21 bp, synthetic construct
  misc_feature 1..21: note = n-mer motif encoding polynucleotide
  source 1..21: mol_type = other DNA
gtgactacgcttactcctgtg

SEQ ID NO: 7451 - protein, 7 aa, synthetic construct
  REGION 1..7: note = n-mer motif
DSHVSGM

SEQ ID NO: 7452 - DNA, 21 bp, synthetic construct
  misc_feature 1..21: note = n-mer motif encoding polynucleotide
  source 1..21: mol_type = other DNA
gatagtcatgtgtcggggatg

SEQ ID NO: 7453 - protein, 7 aa, synthetic construct
  REGION 1..7: note = n-mer motif
LVTPMHM

SEQ ID NO: 7454 - DNA, 21 bp, synthetic construct
  misc_feature 1..21: note = n-mer motif encoding polynucleotide
  source 1..21: mol_type = other DNA
ctcgtaactcccatgcacatg

SEQ ID NO: 7455 - protein, 7 aa, synthetic construct
  REGION 1..7: note = n-mer motif
RVDSEKL

SEQ ID NO: 7456 - DNA, 21 bp, synthetic construct
  misc_feature 1..21: note = n-mer motif encoding polynucleotide
  source 1..21: mol_type = other DNA
agggtggattcggagaagctt

SEQ ID NO: 7457 - protein, 7 aa, synthetic construct
  REGION 1..7: note = n-mer motif
RPEIEVR

SEQ ID NO: 7458 - DNA, 21 bp, synthetic construct
  misc_feature 1..21: note = n-mer motif encoding polynucleotide
  source 1..21: mol_type = other DNA
cggccggagattgaggttagg

SEQ ID NO: 7459 - protein, 7 aa, synthetic construct
  REGION 1..7: note = n-mer motif
QDGPAEK

SEQ ID NO: 7460 - DNA, 21 bp, synthetic construct
  misc_feature 1..21: note = n-mer motif encoding polynucleotide
  source 1..21: mol_type = other DNA
caggatgggcctgcggagaag

SEQ ID NO: 7461 - protein, 7 aa, synthetic construct
  REGION 1..7: note = n-mer motif
MVTPTNT

SEQ ID NO: 7462 - DNA, 21 bp, synthetic construct
  misc_feature 1..21: note = n-mer motif encoding polynucleotide
  source 1..21: mol_type = other DNA
atggttactcctacgaatacg

SEQ ID NO: 7463 - protein, 7 aa, synthetic construct
  REGION 1..7: note = n-mer motif
LSKGSQL

SEQ ID NO: 7464 - DNA, 21 bp, synthetic construct
  misc_feature 1..21: note = n-mer motif encoding polynucleotide
  source 1..21: mol_type = other DNA
ctgtctaaggggtcgcagctg

SEQ ID NO: 7465 - protein, 7 aa, synthetic construct
  REGION 1..7: note = n-mer motif
VIVLTEA

SEQ ID NO: 7466 - DNA, 21 bp, synthetic construct
  misc_feature 1..21: note = n-mer motif encoding polynucleotide
  source 1..21: mol_type = other DNA
gtgattgtgttgacggaggct

SEQ ID NO: 7467 - protein, 7 aa, synthetic construct
  REGION 1..7: note = n-mer motif
QSLTDGV

SEQ ID NO: 7468 - DNA, 21 bp, synthetic construct
  misc_feature 1..21: note = n-mer motif encoding polynucleotide
  source 1..21: mol_type = other DNA
cagagtttgactgatggggtt

SEQ ID NO: 7469 - protein, 7 aa, synthetic construct
  REGION 1..7: note = n-mer motif
MNGAHVL

SEQ ID NO: 7470 - DNA, 21 bp, synthetic construct
  misc_feature 1..21: note = n-mer motif encoding polynucleotide
  source 1..21: mol_type = other DNA
atgaatggggctcatgttctg

SEQ ID NO: 7471 - protein, 7 aa, synthetic construct
  REGION 1..7: note = n-mer motif
RVALDLT

SEQ ID NO: 7472 - DNA, 21 bp, synthetic construct
  misc_feature 1..21: note = n-mer motif encoding polynucleotide
  source 1..21: mol_type = other DNA
agggtggcgctggatttgacg

SEQ ID NO: 7473 - protein, 7 aa, synthetic construct
  REGION 1..7: note = n-mer motif
SQSAFPN

SEQ ID NO: 7474 - DNA, 21 bp, synthetic construct
  misc_feature 1..21: note = n-mer motif encoding polynucleotide
  source 1..21: mol_type = other DNA
agtcagtcggcttttcctaat

SEQ ID NO: 7475 - protein, 7 aa, synthetic construct
  REGION 1..7: note = n-mer motif
LTRGEEK

SEQ ID NO: 7476 - DNA, 21 bp, synthetic construct
  misc_feature 1..21: note = n-mer motif encoding polynucleotide
  source 1..21: mol_type = other DNA
cttacgaggggtgaggagaag

SEQ ID NO: 7477 - protein, 7 aa, synthetic construct
  REGION 1..7: note = n-mer motif
MGASDTL

SEQ ID NO: 7478 - DNA, 21 bp, synthetic construct
  misc_feature 1..21: note = n-mer motif encoding polynucleotide
  source 1..21: mol_type = other DNA
atgggggctagtgatacgctt

SEQ ID NO: 7479 - protein, 7 aa, synthetic construct
  REGION 1..7: note = n-mer motif
NQLAELV

SEQ ID NO: 7480 - DNA, 21 bp, synthetic construct
  misc_feature 1..21: note = n-mer motif encoding polynucleotide
  source 1..21: mol_type = other DNA
aatcagttggcggagctggtt

SEQ ID NO: 7481 - protein, 7 aa, synthetic construct
  REGION 1..7: note = n-mer motif
LGDSADQ

SEQ ID NO: 7482 - DNA, 21 bp, synthetic construct
  misc_feature 1..21: note = n-mer motif encoding polynucleotide
  source 1..21: mol_type = other DNA
cttggggattctgctgatcag

SEQ ID NO: 7483 - protein, 7 aa, synthetic construct
  REGION 1..7: note = n-mer motif
GVSVLND

SEQ ID NO: 7484 - DNA, 21 bp, synthetic construct
  misc_feature 1..21: note = n-mer motif encoding polynucleotide
  source 1..21: mol_type = other DNA
ggggtgagtgtgctgaatgat

SEQ ID NO: 7485 - protein, 7 aa, synthetic construct
  REGION 1..7: note = n-mer motif
TTAAIVK

SEQ ID NO: 7486 - DNA, 21 bp, synthetic construct
  misc_feature 1..21: note = n-mer motif encoding polynucleotide
  source 1..21: mol_type = other DNA
acgacggcggctattgttaag

SEQ ID NO: 7487 - protein, 7 aa, synthetic construct
  REGION 1..7: note = n-mer motif
MGASDTH

SEQ ID NO: 7488 - DNA, 21 bp, synthetic construct
  misc_feature 1..21: note = n-mer motif encoding polynucleotide
  source 1..21: mol_type = other DNA
atgggggctagtgatacgcat

SEQ ID NO: 7489 - protein, 7 aa, synthetic construct
  REGION 1..7: note = n-mer motif
DLNEHVA

SEQ ID NO: 7490 - DNA, 21 bp, synthetic construct
  misc_feature 1..21: note = n-mer motif encoding polynucleotide
  source 1..21: mol_type = other DNA
gatctgaatgagcatgtggcg

SEQ ID NO: 7491 - protein, 7 aa, synthetic construct
  REGION 1..7: note = n-mer motif
MNGGHAL

SEQ ID NO: 7492 - DNA, 21 bp, synthetic construct
  misc_feature 1..21: note = n-mer motif encoding polynucleotide
  source 1..21: mol_type = other DNA
atgaatgggggtcatgctctg

SEQ ID NO: 7493 - protein, 7 aa, synthetic construct
  REGION 1..7: note = n-mer motif
SNGLPAQ

SEQ ID NO: 7494 - DNA, 21 bp, synthetic construct
  misc_feature 1..21: note = n-mer motif encoding polynucleotide
  source 1..21: mol_type = other DNA
agtaatgggcttcctgcgcag

SEQ ID NO: 7495 - protein, 7 aa, synthetic construct
  REGION 1..7: note = n-mer motif
TTTGNLM

SEQ ID NO: 7496 - DNA, 21 bp, synthetic construct
  misc_feature 1..21: note = n-mer motif encoding polynucleotide
  source 1..21: mol_type = other DNA
acgacgacggggaatcttatg

SEQ ID NO: 7497 - protein, 7 aa, synthetic construct
  REGION 1..7: note = n-mer motif
LAGSTGP

SEQ ID NO: 7498 - DNA, 21 bp, synthetic construct
  misc_feature 1..21: note = n-mer motif encoding polynucleotide
  source 1..21: mol_type = other DNA
ttggcggggtcgacgggtccg

SEQ ID NO: 7499 - protein, 7 aa, synthetic construct
  REGION 1..7: note = n-mer motif
AVKEYEL

SEQ ID NO: 7500 - DNA, 21 bp, synthetic construct
  misc_feature 1..21: note = n-mer motif encoding polynucleotide
  source 1..21: mol_type = other DNA
gccgttaaagaatacgaactc

SEQ ID NO: 7501 - protein, 7 aa, synthetic construct
  REGION 1..7: note = n-mer motif
VIAGHGN

SEQ ID NO: 7502 - DNA, 21 bp, synthetic construct
  misc_feature 1..21: note = n-mer motif encoding polynucleotide
  source 1..21: mol_type = other DNA
gttattgctgggcatgggaat

SEQ ID NO: 7503 - protein, 7 aa, synthetic construct
  REGION 1..7: note = n-mer motif
LGDSAET

SEQ ID NO: 7504 - DNA, 21 bp, synthetic construct
  misc_feature 1..21: note = n-mer motif encoding polynucleotide
  source 1..21: mol_type = other DNA
cttggggattctgctgagacg

SEQ ID NO: 7505 - protein, 7 aa, synthetic construct
  REGION 1..7: note = n-mer motif
MVTPTNK

SEQ ID NO: 7506 - DNA, 21 bp, synthetic construct
  misc_feature 1..21: note = n-mer motif encoding polynucleotide
  source 1..21: mol_type = other DNA
atggttactcctacgaataag

SEQ ID NO: 7507 - protein, 7 aa, synthetic construct
  REGION 1..7: note = n-mer motif
AIVSIAR

SEQ ID NO: 7508 - DNA, 21 bp, synthetic construct
  misc_feature 1..21: note = n-mer motif encoding polynucleotide
  source 1..21: mol_type = other DNA
gcgattgtgtcgattgctcgg

SEQ ID NO: 7509 - protein, 7 aa, synthetic construct
  REGION 1..7: note = n-mer motif
SPTSSPT

SEQ ID NO: 7510 - DNA, 21 bp, synthetic construct
  misc_feature 1..21: note = n-mer motif encoding polynucleotide
  source 1..21: mol_type = other DNA
tctccgacgagttcgccgact

SEQ ID NO: 7511 - protein, 7 aa, synthetic construct
  REGION 1..7: note = n-mer motif
ESRNDVV

SEQ ID NO: 7512 - DNA, 21 bp, synthetic construct
  misc_feature 1..21: note = n-mer motif encoding polynucleotide
  source 1..21: mol_type = other DNA
gagtcgaggaatgatgttgtt

SEQ ID NO: 7513 - protein, 7 aa, synthetic construct
  REGION 1..7: note = n-mer motif
TGSSAML

SEQ ID NO: 7514 - DNA, 21 bp, synthetic construct
  misc_feature 1..21: note = n-mer motif encoding polynucleotide
  source 1..21: mol_type = other DNA
acggggagttcggcgatgctt

SEQ ID NO: 7515 - protein, 7 aa, synthetic construct
  REGION 1..7: note = n-mer motif
TVNSIPV

SEQ ID NO: 7516 - DNA, 21 bp, synthetic construct
  misc_feature 1..21: note = n-mer motif encoding polynucleotide
  source 1..21: mol_type = other DNA
acggtcaacagtataccagtc

SEQ ID NO: 7517 - protein, 7 aa, synthetic construct
  REGION 1..7: note = n-mer motif
ITENASR

SEQ ID NO: 7518 - DNA, 21 bp, synthetic construct
  misc_feature 1..21: note = n-mer motif encoding polynucleotide
  source 1..21: mol_type = other DNA
attactgagaatgcgtcgcgg

SEQ ID NO: 7519 - protein, 7 aa, synthetic construct
  REGION 1..7: note = n-mer motif
PILGAST

SEQ ID NO: 7520 - DNA, 21 bp, synthetic construct
  misc_feature 1..21: note = n-mer motif encoding polynucleotide
  source 1..21: mol_type = other DNA
ccgattcttggtgctagtacg

SEQ ID NO: 7521 - protein, 7 aa, synthetic construct
  REGION 1..7: note = n-mer motif
GGKGEGP

SEQ ID NO: 7522 - DNA, 21 bp, synthetic construct
  misc_feature 1..21: note = n-mer motif encoding polynucleotide
  source 1..21: mol_type = other DNA
ggtgggaagggtgagggtccg

SEQ ID NO: 7523 - protein, 7 aa, synthetic construct
  REGION 1..7: note = n-mer motif
IVMDENH

SEQ ID NO: 7524 - DNA, 21 bp, synthetic construct
  misc_feature 1..21: note = n-mer motif encoding polynucleotide
  source 1..21: mol_type = other DNA
atcgtaatggacgaaaaccac

SEQ ID NO: 7525 - protein, 7 aa, synthetic construct
  REGION 1..7: note = n-mer motif
MGASVTL

SEQ ID NO: 7526 - DNA, 21 bp, synthetic construct
  misc_feature 1..21: note = n-mer motif encoding polynucleotide
  source 1..21: mol_type = other DNA
atgggggctagtgttacgctt

SEQ ID NO: 7527 - protein, 7 aa, synthetic construct
  REGION 1..7: note = n-mer motif
AVKEYEA

SEQ ID NO: 7528 - DNA, 21 bp, synthetic construct
  misc_feature 1..21: note = n-mer motif encoding polynucleotide
  source 1..21: mol_type = other DNA
gcggtgaaggagtatgaggcg

SEQ ID NO: 7529 - protein, 7 aa, synthetic construct
  REGION 1..7: note = n-mer motif
TVGLSIA

SEQ ID NO: 7530 - DNA, 21 bp, synthetic construct
  misc_feature 1..21: note = n-mer motif encoding polynucleotide
  source 1..21: mol_type = other DNA
actgtgggtttgtcgattgcg

SEQ ID NO: 7531 - protein, 7 aa, synthetic construct
  REGION 1..7: note = n-mer motif
QVIDTKT

SEQ ID NO: 7532 - DNA, 21 bp, synthetic construct
  misc_feature 1..21: note = n-mer motif encoding polynucleotide
  source 1..21: mol_type = other DNA
caggtgattgatactaagact

SEQ ID NO: 7533 - protein, 7 aa, synthetic construct
  REGION 1..7: note = n-mer motif
DVVLLTR

SEQ ID NO: 7534 - DNA, 21 bp, synthetic construct
  misc_feature 1..21: note = n-mer motif encoding polynucleotide
  source 1..21: mol_type = other DNA
gatgttgttttgttgactagg

SEQ ID NO: 7535 - protein, 7 aa, synthetic construct
  REGION 1..7: note = n-mer motif
DVRGSDI

SEQ ID NO: 7536 - DNA, 21 bp, synthetic construct
  misc_feature 1..21: note = n-mer motif encoding polynucleotide
  source 1..21: mol_type = other DNA
gacgtacgggggtctgacatc

SEQ ID NO: 7537 - protein, 7 aa, synthetic construct
  REGION 1..7: note = n-mer motif
FAEVAQA

SEQ ID NO: 7538 - DNA, 21 bp, synthetic construct
  misc_feature 1..21: note = n-mer motif encoding polynucleotide
  source 1..21: mol_type = other DNA
tttgcggaggttgcgcaggcg

SEQ ID NO: 7539 - protein, 7 aa, synthetic construct
  REGION 1..7: note = n-mer motif
TSLLPQT

SEQ ID NO: 7540 - DNA, 21 bp, synthetic construct
  misc_feature 1..21: note = n-mer motif encoding polynucleotide
  source 1..21: mol_type = other DNA
acgtctctgcttcctcagact

SEQ ID NO: 7541 - protein, 7 aa, synthetic construct
  REGION 1..7: note = n-mer motif
AADSSAR

SEQ ID NO: 7542 - DNA, 21 bp, synthetic construct
  misc_feature 1..21: note = n-mer motif encoding polynucleotide
  source 1..21: mol_type = other DNA
gcggcggatagttctgcgcgg

SEQ ID NO: 7543 - protein, 7 aa, synthetic construct
  REGION 1..7: note = n-mer motif
LGDSAES

SEQ ID NO: 7544 - DNA, 21 bp, synthetic construct
  misc_feature 1..21: note = n-mer motif encoding polynucleotide
  source 1..21: mol_type = other DNA
cttggggattctgctgagtcg

SEQ ID NO: 7545 - protein, 7 aa, synthetic construct
  REGION 1..7: note = n-mer motif
SVDSGLL

SEQ ID NO: 7546 - DNA, 21 bp, synthetic construct
  misc_feature 1..21: note = n-mer motif encoding polynucleotide
  source 1..21: mol_type = other DNA
agtgttgatagtgggctgctt

SEQ ID NO: 7547 - protein, 7 aa, synthetic construct
  REGION 1..7: note = n-mer motif
GRDLTPA

SEQ ID NO: 7548 - DNA, 21 bp, synthetic construct
  misc_feature 1..21: note = n-mer motif encoding polynucleotide
  source 1..21: mol_type = other DNA
ggtcgggatcttacgcctgct

SEQ ID NO: 7549 - protein, 7 aa, synthetic construct
  REGION 1..7: note = n-mer motif
PAREVLY

SEQ ID NO: 7550 - DNA, 21 bp, synthetic construct
  misc_feature 1..21: note = n-mer motif encoding polynucleotide
  source 1..21: mol_type = other DNA
ccggctcgggaggtgctttat

SEQ ID NO: 7551 - protein, 7 aa, synthetic construct
  REGION 1..7: note = n-mer motif
GSDIKHE

SEQ ID NO: 7552 - DNA, 21 bp, synthetic construct
  misc_feature 1..21: note = n-mer motif encoding polynucleotide
  source 1..21: mol_type = other DNA
ggttctgatattaagcatgag

SEQ ID NO: 7553 - protein, 7 aa, synthetic construct
  REGION 1..7: note = n-mer motif
LAGSPGP

SEQ ID NO: 7554 - DNA, 21 bp, synthetic construct
  misc_feature 1..21: note = n-mer motif encoding polynucleotide
  source 1..21: mol_type = other DNA
ttggcggggtcgccgggtccg

SEQ ID NO: 7555 - protein, 7 aa, synthetic construct
  REGION 1..7: note = n-mer motif
DVTVSMR

SEQ ID NO: 7556 - DNA, 21 bp, synthetic construct
  misc_feature 1..21: note = n-mer motif encoding polynucleotide
  source 1..21: mol_type = other DNA
gatgttactgtttctatgcgt

SEQ ID NO: 7557 - protein, 7 aa, synthetic construct
  REGION 1..7: note = n-mer motif
RVDSGQL

SEQ ID NO: 7558 - DNA, 21 bp, synthetic construct
  misc_feature 1..21: note = n-mer motif encoding polynucleotide
  source 1..21: mol_type = other DNA
agggtggattcggggcagctt

SEQ ID NO: 7559 - protein, 7 aa, synthetic construct
  REGION 1..7: note = n-mer motif
MNGGNVM

SEQ ID NO: 7560 - DNA, 21 bp, synthetic construct
  misc_feature 1..21: note = n-mer motif encoding polynucleotide
  source 1..21: mol_type = other DNA
atgaatgggggtaatgttatg

SEQ ID NO: 7561 - protein, 7 aa, synthetic construct
  REGION 1..7: note = n-mer motif
PQLIVPA

SEQ ID NO: 7562 - DNA, 21 bp, synthetic construct
  misc_feature 1..21: note = n-mer motif encoding polynucleotide
  source 1..21: mol_type = other DNA
cctcagcttattgttcctgcg

SEQ ID NO: 7563 - protein, 7 aa, synthetic construct
  REGION 1..7: note = n-mer motif
VTTHTPV

SEQ ID NO: 7564 - DNA, 21 bp, synthetic construct
  misc_feature 1..21: note = n-mer motif encoding polynucleotide
  source 1..21: mol_type = other DNA
gtgactacgcatactcctgtg

SEQ ID NO: 7565 - protein, 7 aa, synthetic construct
  REGION 1..7: note = n-mer motif
MQITGLH

SEQ ID NO: 7566 - DNA, 21 bp, synthetic construct
  misc_feature 1..21: note = n-mer motif encoding polynucleotide
  source 1..21: mol_type = other DNA
atgcagattactggtcttcat

SEQ ID NO: 7567 - protein, 7 aa, synthetic construct
  REGION 1..7: note = n-mer motif
AAREELN

SEQ ID NO: 7568 - DNA, 21 bp, synthetic construct
  misc_feature 1..21: note = n-mer motif encoding polynucleotide
  source 1..21: mol_type = other DNA
gcggctcgggaggagcttaat

SEQ ID NO: 7569 - protein, 7 aa, synthetic construct
  REGION 1..7: note = n-mer motif
AAREVLM

SEQ ID NO: 7570 - DNA, 21 bp, synthetic construct
  misc_feature 1..21: note = n-mer motif encoding polynucleotide
  source 1..21: mol_type = other DNA
gcggctcgggaggtgcttatg

SEQ ID NO: 7571 - protein, 7 aa, synthetic construct
  REGION 1..7: note = n-mer motif
PGGHYQA

SEQ ID NO: 7572 - DNA, 21 bp, synthetic construct
  misc_feature 1..21: note = n-mer motif encoding polynucleotide
  source 1..21: mol_type = other DNA
ccgggtgggcattatcaggct

SEQ ID NO: 7573 - protein, 7 aa, synthetic construct
  REGION 1..7: note = n-mer motif
EVAGTYS

SEQ ID NO: 7574 - DNA, 21 bp, synthetic construct
  misc_feature 1..21: note = n-mer motif encoding polynucleotide
  source 1..21: mol_type = other DNA
gaggtggctgggacgtattct

SEQ ID NO: 7575 - protein, 7 aa, synthetic construct
  REGION 1..7: note = n-mer motif
VVDSNNL

SEQ ID NO: 7576 - DNA, 21 bp, synthetic construct
  misc_feature 1..21: note = n-mer motif encoding polynucleotide
  source 1..21: mol_type = other DNA
gttgttgattcgaataatctg

SEQ ID NO: 7577 - protein, 7 aa, synthetic construct
  REGION 1..7: note = n-mer motif
VRQLDSL

SEQ ID NO: 7578 - DNA, 21 bp, synthetic construct
  misc_feature 1..21: note = n-mer motif encoding polynucleotide
  source 1..21: mol_type = other DNA
gtgaggcagctggattcgctg

SEQ ID NO: 7579 - protein, 7 aa, synthetic construct
  REGION 1..7: note = n-mer motif
QVTDTKT

SEQ ID NO: 7580 - DNA, 21 bp, synthetic construct
  misc_feature 1..21: note = n-mer motif encoding polynucleotide
  source 1..21: mol_type = other DNA
caggtgactgatactaagact

SEQ ID NO: 7581 - protein, 7 aa, synthetic construct
  REGION 1..7: note = n-mer motif
VNDGLGI

SEQ ID NO: 7582 - DNA, 21 bp, synthetic construct
  misc_feature 1..21: note = n-mer motif encoding polynucleotide
  source 1..21: mol_type = other DNA
gttaatgatgggcttgggatt

SEQ ID NO: 7583 - protein, 7 aa, synthetic construct
  REGION 1..7: note = n-mer motif
TTSANLM

SEQ ID NO: 7584 - DNA, 21 bp, synthetic construct
  misc_feature 1..21: note = n-mer motif encoding polynucleotide
  source 1..21: mol_type = other DNA
acgacgtcggcgaatcttatg

SEQ ID NO: 7585 - protein, 7 aa, synthetic construct
  REGION 1..7: note = n-mer motif
GSHVSGD

SEQ ID NO: 7586 - DNA, 21 bp, synthetic construct
  misc_feature 1..21: note = n-mer motif encoding polynucleotide
  source 1..21: mol_type = other DNA
ggtagtcatgtgtcgggggat

SEQ ID NO: 7587 - protein, 7 aa, synthetic construct
  REGION 1..7: note = n-mer motif
GRSQLPM

SEQ ID NO: 7588 - DNA, 21 bp, synthetic construct
  misc_feature 1..21: note = n-mer motif encoding polynucleotide
  source 1..21: mol_type = other DNA
gggcggtcgcagttgccgatg

SEQ ID NO: 7589 - protein, 7 aa, synthetic construct
  REGION 1..7: note = n-mer motif
TVLAASH

SEQ ID NO: 7590 - DNA, 21 bp, synthetic construct
  misc_feature 1..21: note = n-mer motif encoding polynucleotide
  source 1..21: mol_type = other DNA
acggtgttggctgcgtctcat

SEQ ID NO: 7591 - protein, 7 aa, synthetic construct
  REGION 1..7: note = n-mer motif
SPSAFPN

SEQ ID NO: 7592 - DNA, 21 bp, synthetic construct
  misc_feature 1..21: note = n-mer motif encoding polynucleotide
  source 1..21: mol_type = other DNA
agtccgtcggcttttcctaat

SEQ ID NO: 7593 - protein, 7 aa, synthetic construct
  REGION 1..7: note = n-mer motif
QSMTDGV

SEQ ID NO: 7594 - DNA, 21 bp, synthetic construct
  misc_feature 1..21: note = n-mer motif encoding polynucleotide
  source 1..21: mol_type = other DNA
cagagtatgactgatggggtt

SEQ ID NO: 7595 - protein, 7 aa, synthetic construct
  REGION 1..7: note = n-mer motif
QSLSKDK

SEQ ID NO: 7596 - DNA, 21 bp, synthetic construct
  misc_feature 1..21: note = n-mer motif encoding polynucleotide
  source 1..21: mol_type = other DNA
cagagtcttagtaaggataag

SEQ ID NO: 7597 - protein, 7 aa, synthetic construct
  REGION 1..7: note = n-mer motif
REALSVT

SEQ ID NO: 7598 - DNA, 21 bp, synthetic construct
  misc_feature 1..21: note = n-mer motif encoding polynucleotide
  source 1..21: mol_type = other DNA
agggaggcgctgtctgtgacg

SEQ ID NO: 7599 - protein, 7 aa, synthetic construct
  REGION 1..7: note = n-mer motif
VIAGHGI

SEQ ID NO: 7600 - DNA, 21 bp, synthetic construct
  misc_feature 1..21: note = n-mer motif encoding polynucleotide
  source 1..21: mol_type = other DNA
gttattgctgggcatgggatt

SEQ ID NO: 7601 - protein, 7 aa, synthetic construct
  REGION 1..7: note = n-mer motif
MNGGHVI

SEQ ID NO: 7602 - DNA, 21 bp, synthetic construct
  misc_feature 1..21: note = n-mer motif encoding polynucleotide
  source 1..21: mol_type = other DNA
atgaatgggggtcatgttatt

SEQ ID NO: 7603 - protein, 7 aa, synthetic construct
  REGION 1..7: note = n-mer motif
NQLAEQV

SEQ ID NO: 7604 - DNA, 21 bp, synthetic construct
  misc_feature 1..21: note = n-mer motif encoding polynucleotide
  source 1..21: mol_type = other DNA
aatcagttggcggagcaggtt

SEQ ID NO: 7605 - protein, 7 aa, synthetic construct
  REGION 1..7: note = n-mer motif
PAREVHY

SEQ ID NO: 7606 - DNA, 21 bp, synthetic construct
  misc_feature 1..21: note = n-mer motif encoding polynucleotide
  source 1..21: mol_type = other DNA
ccggctcgggaggtgcattat

SEQ ID NO: 7607 - protein, 7 aa, synthetic construct
  REGION 1..7: note = n-mer motif
VLASLGP

SEQ ID NO: 7608 - DNA, 21 bp, synthetic construct
  misc_feature 1..21: note = n-mer motif encoding polynucleotide
  source 1..21: mol_type = other DNA
gttctggcttcgcttggtcct

SEQ ID NO: 7609 - protein, 7 aa, synthetic construct
  REGION 1..7: note = n-mer motif
PARELHY

SEQ ID NO: 7610 - DNA, 21 bp, synthetic construct
  misc_feature 1..21: note = n-mer motif encoding polynucleotide
  source 1..21: mol_type = other DNA
ccggctcgggagctgcattat

SEQ ID NO: 7611 - protein, 7 aa, synthetic construct
  REGION 1..7: note = n-mer motif
MSITEPR

SEQ ID NO: 7612 - DNA, 21 bp, synthetic construct
  misc_feature 1..21: note = n-mer motif encoding polynucleotide
  source 1..21: mol_type = other DNA
atgtctattactgagccgcgg

SEQ ID NO: 7613 - protein, 7 aa, synthetic construct
  REGION 1..7: note = n-mer motif
AAGVIPN

SEQ ID NO: 7614 - DNA, 21 bp, synthetic construct
  misc_feature 1..21: note = n-mer motif encoding polynucleotide
  source 1..21: mol_type = other DNA
gcggcgggtgttattccgaat

SEQ ID NO: 7615 - protein, 7 aa, synthetic construct
  REGION 1..7: note = n-mer motif
VTRGTGN

SEQ ID NO: 7616 - DNA, 21 bp, synthetic construct
  misc_feature 1..21: note = n-mer motif encoding polynucleotide
  source 1..21: mol_type = other DNA
gttactcgtggtacgggtaat

SEQ ID NO: 7617 - protein, 7 aa, synthetic construct
  REGION 1..7: note = n-mer motif
GVGVLNV

SEQ ID NO: 7618 - DNA, 21 bp, synthetic construct
  misc_feature 1..21: note = n-mer motif encoding polynucleotide
  source 1..21: mol_type = other DNA
ggggtgggtgtgctgaatgtt

SEQ ID NO: 7619 - protein, 7 aa, synthetic construct
  REGION 1..7: note = n-mer motif
QSPGSQL

SEQ ID NO: 7620 - DNA, 21 bp, synthetic construct
  misc_feature 1..21: note = n-mer motif encoding polynucleotide
  source 1..21: mol_type = other DNA
cagtctccggggtcgcagctg

SEQ ID NO: 7621 - protein, 7 aa, synthetic construct
  REGION 1..7: note = n-mer motif
RPEIAGR

SEQ ID NO: 7622 - DNA, 21 bp, synthetic construct
  misc_feature 1..21: note = n-mer motif encoding polynucleotide
  source 1..21: mol_type = other DNA
cggccggagattgcgggtagg

SEQ ID NO: 7623 - protein, 7 aa, synthetic construct
  REGION 1..7: note = n-mer motif
PILGASS

SEQ ID NO: 7624 - DNA, 21 bp, synthetic construct
  misc_feature 1..21: note = n-mer motif encoding polynucleotide
  source 1..21: mol_type = other DNA
ccgattcttggtgctagttcg

SEQ ID NO: 7625 - protein, 7 aa, synthetic construct
  REGION 1..7: note = n-mer motif
RVDSEQL

SEQ ID NO: 7626 - DNA, 21 bp, synthetic construct
  misc_feature 1..21: note = n-mer motif encoding polynucleotide
  source 1..21: mol_type = other DNA
agggtggattcggagcagctt

SEQ ID NO: 7627 - protein, 7 aa, synthetic construct
  REGION 1..7: note = n-mer motif
TTYDTLV

SEQ ID NO: 7628 - DNA, 21 bp, synthetic construct
  misc_feature 1..21: note = n-mer motif encoding polynucleotide
  source 1..21: mol_type = other DNA
acgacgtatgatacgttggtt

SEQ ID NO: 7629 - protein, 7 aa, synthetic construct
  REGION 1..7: note = n-mer motif
VFVEKSA

SEQ ID NO: 7630 - DNA, 21 bp, synthetic construct
  misc_feature 1..21: note = n-mer motif encoding polynucleotide
  source 1..21: mol_type = other DNA
gtttttgttgagaagagtgcg

SEQ ID NO: 7631 - protein, 7 aa, synthetic construct
  REGION 1..7: note = n-mer motif
VGSLTAS

SEQ ID NO: 7632 - DNA, 21 bp, synthetic construct
  misc_feature 1..21: note = n-mer motif encoding polynucleotide
  source 1..21: mol_type = other DNA
gtggggtcgcttacggctagt

SEQ ID NO: 7633 - protein, 7 aa, synthetic construct
  REGION 1..7: note = n-mer motif
QNMGVTQ

SEQ ID NO: 7634 - DNA, 21 bp, synthetic construct
  misc_feature 1..21: note = n-mer motif encoding polynucleotide
  source 1..21: mol_type = other DNA
cagaatatgggggtgactcag

SEQ ID NO: 7635 - protein, 7 aa, synthetic construct
  REGION 1..7: note = n-mer motif
GVSVPNV

SEQ ID NO: 7636 - DNA, 21 bp, synthetic construct
  misc_feature 1..21: note = n-mer motif encoding polynucleotide
  source 1..21: mol_type = other DNA
ggggtgagtgtgccgaatgtt

SEQ ID NO: 7637 - protein, 7 aa, synthetic construct
  REGION 1..7: note = n-mer motif
GSRENAR

SEQ ID NO: 7638 - DNA, 21 bp, synthetic construct
  misc_feature 1..21: note = n-mer motif encoding polynucleotide
  source 1..21: mol_type = other DNA
gggagtagggagaatgcgcgt

SEQ ID NO: 7639 - protein, 7 aa, synthetic construct
  REGION 1..7: note = n-mer motif
PGEHYEA

SEQ ID NO: 7640 - DNA, 21 bp, synthetic construct
  misc_feature 1..21: note = n-mer motif encoding polynucleotide
  source 1..21: mol_type = other DNA
ccgggtgagcattatgaggct

SEQ ID NO: 7641 - protein, 7 aa, synthetic construct
  REGION 1..7: note = n-mer motif
AVGVILN

SEQ ID NO: 7642 - DNA, 21 bp, synthetic construct
  misc_feature 1..21: note = n-mer motif encoding polynucleotide
  source 1..21: mol_type = other DNA
gcggtgggtgttattctgaat

SEQ ID NO: 7643 - protein, 7 aa, synthetic construct
  REGION 1..7: note = n-mer motif
TLAINER

SEQ ID NO: 7644 - DNA, 21 bp, synthetic construct
  misc_feature 1..21: note = n-mer motif encoding polynucleotide
  source 1..21: mol_type = other DNA
actttggcgattaatgagcgg

SEQ ID NO: 7645 - protein, 7 aa, synthetic construct
  REGION 1..7: note = n-mer motif
MNGGHVL

SEQ ID NO: 7646 - DNA, 21 bp, synthetic construct
  misc_feature 1..21: note = n-mer motif encoding polynucleotide
  source 1..21: mol_type = other DNA
atgaatgggggtcatgttctg

SEQ ID NO: 7647 - protein, 7 aa, synthetic construct
  REGION 1..7: note = n-mer motif
LGGVSSE

SEQ ID NO: 7648 - DNA, 21 bp, synthetic construct
  misc_feature 1..21: note = n-mer motif encoding polynucleotide
  source 1..21: mol_type = other DNA
ctggggggtgtgtcgtctgag

SEQ ID NO: 7649 - protein, 7 aa, synthetic construct
  REGION 1..7: note = n-mer motif
TVGLTIA

SEQ ID NO: 7650 - DNA, 21 bp, synthetic construct
  misc_feature 1..21: note = n-mer motif encoding polynucleotide
  source 1..21: mol_type = other DNA
actgtgggtttgacgattgcg

SEQ ID NO: 7651 - protein, 7 aa, synthetic construct
  REGION 1..7: note = n-mer motif
WNGRETT

SEQ ID NO: 7652 - DNA, 21 bp, synthetic construct
  misc_feature 1..21: note = n-mer motif encoding polynucleotide
  source 1..21: mol_type = other DNA
tggaatggtcgggagactact

SEQ ID NO: 7653 - protein, 7 aa, synthetic construct
  REGION 1..7: note = n-mer motif
RHVHVEG

SEQ ID NO: 7654 - DNA, 21 bp, synthetic construct
  misc_feature 1..21: note = n-mer motif encoding polynucleotide
  source 1..21: mol_type = other DNA
cgccacgtacacgtcgaaggc

SEQ ID NO: 7655 - protein, 7 aa, synthetic construct
  REGION 1..7: note = n-mer motif
DSRVSGD

SEQ ID NO: 7656 - DNA, 21 bp, synthetic construct
  misc_feature 1..21: note = n-mer motif encoding polynucleotide
  source 1..21: mol_type = other DNA
gatagtcgtgtgtcgggggat

SEQ ID NO: 7657 - protein, 7 aa, synthetic construct
  REGION 1..7: note = n-mer motif
RPEIAVR

SEQ ID NO: 7658 - DNA, 21 bp, synthetic construct
  misc_feature 1..21: note = n-mer motif encoding polynucleotide
  source 1..21: mol_type = other DNA
cggccggagattgcggttagg

SEQ ID NO: 7659 - protein, 7 aa, synthetic construct
  REGION 1..7: note = n-mer motif
DVSVSMR

SEQ ID NO: 7660 - DNA, 21 bp, synthetic construct
  misc_feature 1..21: note = n-mer motif encoding polynucleotide
  source 1..21: mol_type = other DNA
gatgtttctgtttctatgcgt

SEQ ID NO: 7661 - protein, 7 aa, synthetic construct
  REGION 1..7: note = n-mer motif
IVTPTNT

SEQ ID NO: 7662 - DNA, 21 bp, synthetic construct
  misc_feature 1..21: note = n-mer motif encoding polynucleotide
  source 1..21: mol_type = other DNA
attgttactcctacgaatacg

SEQ ID NO: 7663 - protein, 7 aa, synthetic construct
  REGION 1..7: note = n-mer motif
SPTSSPP

SEQ ID NO: 7664 - DNA, 21 bp, synthetic construct
  misc_feature 1..21: note = n-mer motif encoding polynucleotide
  source 1..21: mol_type = other DNA
tctccgacgagttcgccgcct

SEQ ID NO: 7665 - protein, 7 aa, synthetic construct
  REGION 1..7: note = n-mer motif
NHGTDSK

SEQ ID NO: 7666 - DNA, 21 bp, synthetic construct
  misc_feature 1..21: note = n-mer motif encoding polynucleotide
  source 1..21: mol_type = other DNA
aaccacggaacagactctaaa

SEQ ID NO: 7667 - protein, 7 aa, synthetic construct
  REGION 1..7: note = n-mer motif
KNPGVDS

SEQ ID NO: 7668 - DNA, 21 bp, synthetic construct
  misc_feature 1..21: note = n-mer motif encoding polynucleotide
  source 1..21: mol_type = other DNA
aagaatccgggggtggattct

SEQ ID NO: 7669 - protein, 7 aa, synthetic construct
  REGION 1..7: note = n-mer motif
PDRHGGL

SEQ ID NO: 7670 - DNA, 21 bp, synthetic construct
  misc_feature 1..21: note = n-mer motif encoding polynucleotide
  source 1..21: mol_type = other DNA
cctgatcggcatggtgggctg

SEQ ID NO: 7671 - protein, 7 aa, synthetic construct
  REGION 1..7: note = n-mer motif
VVDSDNL

SEQ ID NO: 7672 - DNA, 21 bp, synthetic construct
  misc_feature 1..21: note = n-mer motif encoding polynucleotide
  source 1..21: mol_type = other DNA
gttgttgattcggataatctg

SEQ ID NO: 7673 - protein, 7 aa, synthetic construct
  REGION 1..7: note = n-mer motif
NQLGELV

SEQ ID NO: 7674 - DNA, 21 bp, synthetic construct
  misc_feature 1..21: note = n-mer motif encoding polynucleotide
  source 1..21: mol_type = other DNA
aatcagttgggggagctggtt

SEQ ID NO: 7675 - protein, 7 aa, synthetic construct
  REGION 1..7: note = n-mer motif
NQLAEPV

SEQ ID NO: 7676 - DNA, 21 bp, synthetic construct
  misc_feature 1..21: note = n-mer motif encoding polynucleotide
  source 1..21: mol_type = other DNA
aatcagttggcggagccggtt

SEQ ID NO: 7677 - protein, 7 aa, synthetic construct
  REGION 1..7: note = n-mer motif
WIGRETT

SEQ ID NO: 7678 - DNA, 21 bp, synthetic construct
  misc_feature 1..21: note = n-mer motif encoding polynucleotide
  source 1..21: mol_type = other DNA
tggattggtcgggagactact

SEQ ID NO: 7679 - protein, 7 aa, synthetic construct
  REGION 1..7: note = n-mer motif
SGAPLRL

SEQ ID NO: 7680 - DNA, 21 bp, synthetic construct
  misc_feature 1..21: note = n-mer motif encoding polynucleotide
  source 1..21: mol_type = other DNA
tctggggcgccgcttaggctt

SEQ ID NO: 7681 - protein, 7 aa, synthetic construct
  REGION 1..7: note = n-mer motif
VLLGINM

SEQ ID NO: 7682 - DNA, 21 bp, synthetic construct
  misc_feature 1..21: note = n-mer motif encoding polynucleotide
  source 1..21: mol_type = other DNA
gtgcttttgggtattaatatg

SEQ ID NO: 7683 - protein, 7 aa, synthetic construct
  REGION 1..7: note = n-mer motif
SHGYDSK

SEQ ID NO: 7684 - DNA, 21 bp, synthetic construct
  misc_feature 1..21: note = n-mer motif encoding polynucleotide
  source 1..21: mol_type = other DNA
tcgcacggctacgactctaaa

SEQ ID NO: 7685 - protein, 7 aa, synthetic construct
  REGION 1..7: note = n-mer motif
PGAHYQA

SEQ ID NO: 7686 - DNA, 21 bp, synthetic construct
  misc_feature 1..21: note = n-mer motif encoding polynucleotide
  source 1..21: mol_type = other DNA
ccgggtgcgcattatcaggct

SEQ ID NO: 7687 - protein, 7 aa, synthetic construct
  REGION 1..7: note = n-mer motif
ASESSPP

SEQ ID NO: 7688 - DNA, 21 bp, synthetic construct
  misc_feature 1..21: note = n-mer motif encoding polynucleotide
  source 1..21: mol_type = other DNA
gcatcagaatcatcaccaccc

SEQ ID NO: 7689 - protein, 7 aa, synthetic construct
  REGION 1..7: note = n-mer motif
QNVGVTQ

SEQ ID NO: 7690 - DNA, 21 bp, synthetic construct
  misc_feature 1..21: note = n-mer motif encoding polynucleotide
  source 1..21: mol_type = other DNA
cagaatgtgggggtgactcag

SEQ ID NO: 7691 - protein, 7 aa, synthetic construct
  REGION 1..7: note = n-mer motif
GEQQKVW

SEQ ID NO: 7692 - DNA, 21 bp, synthetic construct
  misc_feature 1..21: note = n-mer motif encoding polynucleotide
  source 1..21: mol_type = other DNA
ggtgagcagcagaaggtttgg

SEQ ID NO: 7693 - protein, 7 aa, synthetic construct
  REGION 1..7: note = n-mer motif
AQAQTGW

SEQ ID NO: 7694 - DNA, 21 bp, synthetic construct
  misc_feature 1..21: note = n-mer motif encoding polynucleotide
  source 1..21: mol_type = other DNA
gctcaagcacagaccggctgg

SEQ ID NO: 7695 - protein, 7 aa, synthetic construct
  REGION 1..7: note = n-mer motif
STLHTTT

SEQ ID NO: 7696 - DNA, 21 bp, synthetic construct
  misc_feature 1..21: note = n-mer motif encoding polynucleotide
  source 1..21: mol_type = other DNA
agtactcttcatactacgact

SEQ ID NO: 7697 - protein, 7 aa, synthetic construct
  REGION 1..7: note = n-mer motif
AVLSQNL

SEQ ID NO: 7698 - DNA, 21 bp, synthetic construct
  misc_feature 1..21: note = n-mer motif encoding polynucleotide
  source 1..21: mol_type = other DNA
gctgtgttgtctcagaatctt

SEQ ID NO: 7699 - protein, 7 aa, synthetic construct
  REGION 1..7: note = n-mer motif
GAVSSTK

SEQ ID NO: 7700 - DNA, 21 bp, synthetic construct
  misc_feature 1..21: note = n-mer motif encoding polynucleotide
  source 1..21: mol_type = other DNA
ggtgctgtttcttcgactaag

SEQ ID NO: 7701 - protein, 7 aa, synthetic construct
  REGION 1..7: note = n-mer motif
PTQETLR

SEQ ID NO: 7702 - DNA, 21 bp, synthetic construct
  misc_feature 1..21: note = n-mer motif encoding polynucleotide
  source 1..21: mol_type = other DNA
cctactcaggagacgcttcgg

SEQ ID NO: 7703 - protein, 7 aa, synthetic construct
  REGION 1..7: note = n-mer motif
QYVVSGV

SEQ ID NO: 7704 - DNA, 21 bp, synthetic construct
  misc_feature 1..21: note = n-mer motif encoding polynucleotide
  source 1..21: mol_type = other DNA
cagtatgttgttagtggtgtg

SEQ ID NO: 7705 - protein, 7 aa, synthetic construct
  REGION 1..7: note = n-mer motif
LAGLGGP

SEQ ID NO: 7706 - DNA, 21 bp, synthetic construct
  misc_feature 1..21: note = n-mer motif encoding polynucleotide
  source 1..21: mol_type = other DNA
cttgcgggtttgggggggcct

SEQ ID NO: 7707 - protein, 7 aa, synthetic construct
  REGION 1..7: note = n-mer motif
QTMKDFY

SEQ ID NO: 7708 - DNA, 21 bp, synthetic construct
  misc_feature 1..21: note = n-mer motif encoding polynucleotide
  source 1..21: mol_type = other DNA
cagacgatgaaggatttttat

SEQ ID NO: 7709 - protein, 7 aa, synthetic construct
  REGION 1..7: note = n-mer motif
VGSVMAS

SEQ ID NO: 7710 - DNA, 21 bp, synthetic construct
  misc_feature 1..21: note = n-mer motif encoding polynucleotide
  source 1..21: mol_type = other DNA
gtggggtcggttatggctagt

SEQ ID NO: 7711 - protein, 7 aa, synthetic construct
  REGION 1..7: note = n-mer motif
AHIGTLT

SEQ ID NO: 7712 - DNA, 21 bp, synthetic construct
  misc_feature 1..21: note = n-mer motif encoding polynucleotide
  source 1..21: mol_type = other DNA
gcacacatcggaactctcacc

SEQ ID NO: 7713 - protein, 7 aa, synthetic construct
  REGION 1..7: note = n-mer motif
MVTPTIT

SEQ ID NO: 7714 - DNA, 21 bp, synthetic construct
  misc_feature 1..21: note = n-mer motif encoding polynucleotide
  source 1..21: mol_type = other DNA
atggttactcctacgattacg

SEQ ID NO: 7715 - protein, 7 aa, synthetic construct
  REGION 1..7: note = n-mer motif
MLTPTNT

SEQ ID NO: 7716 - DNA, 21 bp, synthetic construct
  misc_feature 1..21: note = n-mer motif encoding polynucleotide
  source 1..21: mol_type = other DNA
atgcttactcctacgaatacg

SEQ ID NO: 7717 - protein, 7 aa, synthetic construct
  REGION 1..7: note = n-mer motif
TGDRDQN

SEQ ID NO: 7718 - DNA, 21 bp, synthetic construct
  misc_feature 1..21: note = n-mer motif encoding polynucleotide
  source 1..21: mol_type = other DNA
actggtgatcgggatcagaat

SEQ ID NO: 7719 - protein, 7 aa, synthetic construct
  REGION 1..7: note = n-mer motif
GGVSSTN

SEQ ID NO: 7720 - DNA, 21 bp, synthetic construct
  misc_feature 1..21: note = n-mer motif encoding polynucleotide
  source 1..21: mol_type = other DNA
ggtggtgtttcttcgactaat

SEQ ID NO: 7721 - protein, 7 aa, synthetic construct
  REGION 1..7: note = n-mer motif
LSNHGPI

SEQ ID NO: 7722 - DNA, 21 bp, synthetic construct
  misc_feature 1..21: note = n-mer motif encoding polynucleotide
  source 1..21: mol_type = other DNA
ctgagtaatcatgggcctatt

SEQ ID NO: 7723 - protein, 7 aa, synthetic construct
  REGION 1..7: note = n-mer motif
ALTNGQR

SEQ ID NO: 7724 - DNA, 21 bp, synthetic construct
  misc_feature 1..21: note = n-mer motif encoding polynucleotide
  source 1..21: mol_type = other DNA
gcactaaccaacggtcaacgt

SEQ ID NO: 7725 - protein, 7 aa, synthetic construct
  REGION 1..7: note = n-mer motif
NQLSELV

SEQ ID NO: 7726 - DNA, 21 bp, synthetic construct
  misc_feature 1..21: note = n-mer motif encoding polynucleotide
  source 1..21: mol_type = other DNA
aatcagttgtcggagctggtt

SEQ ID NO: 7727 - protein, 7 aa, synthetic construct
  REGION 1..7: note = n-mer motif
GALTSTK

SEQ ID NO: 7728 - DNA, 21 bp, synthetic construct
  misc_feature 1..21: note = n-mer motif encoding polynucleotide
  source 1..21: mol_type = other DNA
ggtgctcttacttcgactaag

SEQ ID NO: 7729 - protein, 7 aa, synthetic construct
  REGION 1..7: note = n-mer motif
VGSVTAS

SEQ ID NO: 7730 - DNA, 21 bp, synthetic construct
  misc_feature 1..21: note = n-mer motif encoding polynucleotide
  source 1..21: mol_type = other DNA
gtggggtcggttacggctagt

SEQ ID NO: 7731 - protein, 7 aa, synthetic construct
  REGION 1..7: note = n-mer motif
VLASHGT

SEQ ID NO: 7732 - DNA, 21 bp, synthetic construct
  misc_feature 1..21: note = n-mer motif encoding polynucleotide
  source 1..21: mol_type = other DNA
gttctggcttcgcatggtact

SEQ ID NO: 7733 - protein, 7 aa, synthetic construct
  REGION 1..7: note = n-mer motif
AVKEYET

SEQ ID NO: 7734 - DNA, 21 bp, synthetic construct
  misc_feature 1..21: note = n-mer motif encoding polynucleotide
  source 1..21: mol_type = other DNA
gcggtgaaggagtatgagacg

SEQ ID NO: 7735 - protein, 7 aa, synthetic construct
  REGION 1..7: note = n-mer motif
RGGVSTE

SEQ ID NO: 7736 - DNA, 21 bp, synthetic construct
  misc_feature 1..21: note = n-mer motif encoding polynucleotide
  source 1..21: mol_type = other DNA
cgggggggtgtgtcgactgag

SEQ ID NO: 7737 - protein, 7 aa, synthetic construct
  REGION 1..7: note = n-mer motif
SGGKEEM

SEQ ID NO: 7738 - DNA, 21 bp, synthetic construct
  misc_feature 1..21: note = n-mer motif encoding polynucleotide
  source 1..21: mol_type = other DNA
agtgggggtaaggaggagatg

SEQ ID NO: 7739 - protein, 7 aa, synthetic construct
  REGION 1..7: note = n-mer motif
HGTLVSQ

SEQ ID NO: 7740 - DNA, 21 bp, synthetic construct
  misc_feature 1..21: note = n-mer motif encoding polynucleotide
  source 1..21: mol_type = other DNA
catgggactttggtgtctcag

SEQ ID NO: 7741 - protein, 7 aa, synthetic construct
  REGION 1..7: note = n-mer motif
LMNDLLS

SEQ ID NO: 7742 - DNA, 21 bp, synthetic construct
  misc_feature 1..21: note = n-mer motif encoding polynucleotide
  source 1..21: mol_type = other DNA
cttatgaacgacttactctcc

SEQ ID NO: 7743 - protein, 7 aa, synthetic construct
  REGION 1..7: note = n-mer motif
DAPRDGA

SEQ ID NO: 7744 - DNA, 21 bp, synthetic construct
  misc_feature 1..21: note = n-mer motif encoding polynucleotide
  source 1..21: mol_type = other DNA
gacgcaccccgcgacggggct

SEQ ID NO: 7745 - protein, 7 aa, synthetic construct
  REGION 1..7: note = n-mer motif
RTTEPRF

SEQ ID NO: 7746 - DNA, 21 bp, synthetic construct
  misc_feature 1..21: note = n-mer motif encoding polynucleotide
  source 1..21: mol_type = other DNA
cgtactacggagcctcgtttt

SEQ ID NO: 7747 - protein, 7 aa, synthetic construct
  REGION 1..7: note = n-mer motif
TLPELNL

SEQ ID NO: 7748 - DNA, 21 bp, synthetic construct
  misc_feature 1..21: note = n-mer motif encoding polynucleotide
  source 1..21: mol_type = other DNA
acgttgccggagttgaatctt

SEQ ID NO: 7749 - protein, 7 aa, synthetic construct
  REGION 1..7: note = n-mer motif
LTKSTEW

SEQ ID NO: 7750 - DNA, 21 bp, synthetic construct
  misc_feature 1..21: note = n-mer motif encoding polynucleotide
  source 1..21: mol_type = other DNA
ctcaccaaatccacagaatgg

SEQ ID NO: 7751 - protein, 7 aa, synthetic construct
  REGION 1..7: note = n-mer motif
QVPDNKT

SEQ ID NO: 7752 - DNA, 21 bp, synthetic construct
  misc_feature 1..21: note = n-mer motif encoding polynucleotide
  source 1..21: mol_type = other DNA
caggtgcctgataataagact

SEQ ID NO: 7753 - protein, 7 aa, synthetic construct
  REGION 1..7: note = n-mer motif
QGGDSGG

SEQ ID NO: 7754 - DNA, 21 bp, synthetic construct
  misc_feature 1..21: note = n-mer motif encoding polynucleotide
  source 1..21: mol_type = other DNA
cagggtggtgatagtgggggt

SEQ ID NO: 7755 - protein, 7 aa, synthetic construct
  REGION 1..7: note = n-mer motif
LSTGEEM

SEQ ID NO: 7756 - DNA, 21 bp, synthetic construct
  misc_feature 1..21: note = n-mer motif encoding polynucleotide
  source 1..21: mol_type = other DNA
ctttcgacgggtgaggagatg

SEQ ID NO: 7757 - protein, 7 aa, synthetic construct
  REGION 1..7: note = n-mer motif
PEPRSSY

SEQ ID NO: 7758 - DNA, 21 bp, synthetic construct
  misc_feature 1..21: note = n-mer motif encoding polynucleotide
  source 1..21: mol_type = other DNA
cctgagccgcgtagtagttat

SEQ ID NO: 7759 - protein, 7 aa, synthetic construct
  REGION 1..7: note = n-mer motif
LISTTLR

SEQ ID NO: 7760 - DNA, 21 bp, synthetic construct
  misc_feature 1..21: note = n-mer motif encoding polynucleotide
  source 1..21: mol_type = other DNA
ttgatttctactacgctgcgt

SEQ ID NO: 7761 - protein, 7 aa, synthetic construct
  REGION 1..7: note = n-mer motif
RVTPTNT

SEQ ID NO: 7762 - DNA, 21 bp, synthetic construct
  misc_feature 1..21: note = n-mer motif encoding polynucleotide
  source 1..21: mol_type = other DNA
cgcgtgacgccaactaacact

SEQ ID NO: 7763 - protein, 7 aa, synthetic construct
  REGION 1..7: note = n-mer motif
HKDRTTL

SEQ ID NO: 7764 - DNA, 21 bp, synthetic construct
  misc_feature 1..21: note = n-mer motif encoding polynucleotide
  source 1..21: mol_type = other DNA
cataaggataggacgacgctt

SEQ ID NO: 7765 - protein, 7 aa, synthetic construct
  REGION 1..7: note = n-mer motif
STEYAML

SEQ ID NO: 7766 - DNA, 21 bp, synthetic construct
  misc_feature 1..21: note = n-mer motif encoding polynucleotide
  source 1..21: mol_type = other DNA
tctactgagtatgcgatgttg

SEQ ID NO: 7767 - protein, 7 aa, synthetic construct
  REGION 1..7: note = n-mer motif
NLGAELS

SEQ ID NO: 7768 - DNA, 21 bp, synthetic construct
  misc_feature 1..21: note = n-mer motif encoding polynucleotide
  source 1..21: mol_type = other DNA
aacttgggggcagaactatcg

SEQ ID NO: 7769 - protein, 7 aa, synthetic construct
  REGION 1..7: note = n-mer motif
QNGLQLL

SEQ ID NO: 7770 - DNA, 21 bp, synthetic construct
  misc_feature 1..21: note = n-mer motif encoding polynucleotide
  source 1..21: mol_type = other DNA
cagaatgggttgcagcttttg

SEQ ID NO: 7771 - protein, 7 aa, synthetic construct
  REGION 1..7: note = n-mer motif
LISGTLR

SEQ ID NO: 7772 - DNA, 21 bp, synthetic construct
  misc_feature 1..21: note = n-mer motif encoding polynucleotide
  source 1..21: mol_type = other DNA
ttgatttctggtacgctgcgt

SEQ ID NO: 7773 - protein, 7 aa, synthetic construct
  REGION 1..7: note = n-mer motif
ANQNVII

SEQ ID NO: 7774 - DNA, 21 bp, synthetic construct
  misc_feature 1..21: note = n-mer motif encoding polynucleotide
  source 1..21: mol_type = other DNA
gcaaaccaaaacgtaataata

SEQ ID NO: 7775 - protein, 7 aa, synthetic construct
  REGION 1..7: note = n-mer motif
SPPPNAR

SEQ ID NO: 7776 - DNA, 21 bp, synthetic construct
  misc_feature 1..21: note = n-mer motif encoding polynucleotide
  source 1..21: mol_type = other DNA
agcccgccgccgaacgcgcgt

SEQ ID NO: 7777 - protein, 7 aa, synthetic construct
  REGION 1..7: note = n-mer motif
SSADYQV

SEQ ID NO: 7778 - DNA, 21 bp, synthetic construct
  misc_feature 1..21: note = n-mer motif encoding polynucleotide
  source 1..21: mol_type = other DNA
agttctgcggattatcaggtt

SEQ ID NO: 7779 - protein, 7 aa, synthetic construct
  REGION 1..7: note = n-mer motif
KQVSMES

SEQ ID NO: 7780 - DNA, 21 bp, synthetic construct
  misc_feature 1..21: note = n-mer motif encoding polynucleotide
  source 1..21: mol_type = other DNA
aagcaggtgtcgatggagtcg

SEQ ID NO: 7781 - protein, 7 aa, synthetic construct
  REGION 1..7: note = n-mer motif
RVALDVT

SEQ ID NO: 7782 - DNA, 21 bp, synthetic construct
  misc_feature 1..21: note = n-mer motif encoding polynucleotide
  source 1..21: mol_type = other DNA
agggtggcgctggatgtgacg

SEQ ID NO: 7783 - protein, 7 aa, synthetic construct
  REGION 1..7: note = n-mer motif
LNMGPLH

SEQ ID NO: 7784 - DNA, 21 bp, synthetic construct
  misc_feature 1..21: note = n-mer motif encoding polynucleotide
  source 1..21: mol_type = other DNA
ctgaatatgggtcctttgcat

SEQ ID NO: 7785 - protein, 7 aa, synthetic construct
  REGION 1..7: note = n-mer motif
IPRIHSL

SEQ ID NO: 7786 - DNA, 21 bp, synthetic construct
  misc_feature 1..21: note = n-mer motif encoding polynucleotide
  source 1..21: mol_type = other DNA
attcctcggattcattctctt

SEQ ID NO: 7787 - protein, 7 aa, synthetic construct
  REGION 1..7: note = n-mer motif
IGSSLSP

SEQ ID NO: 7788 - DNA, 21 bp, synthetic construct
  misc_feature 1..21: note = n-mer motif encoding polynucleotide
  source 1..21: mol_type = other DNA
attgggtcgtcgcttagtcct

SEQ ID NO: 7789 - protein, 7 aa, synthetic construct
  REGION 1..7: note = n-mer motif
LEKDPMT

SEQ ID NO: 7790 - DNA, 21 bp, synthetic construct
  misc_feature 1..21: note = n-mer motif encoding polynucleotide
  source 1..21: mol_type = other DNA
ttggaaaaagaccctatgact

SEQ ID NO: 7791 - protein, 7 aa, synthetic construct
  REGION 1..7: note = n-mer motif
MVTNTNT

SEQ ID NO: 7792 - DNA, 21 bp, synthetic construct
  misc_feature 1..21: note = n-mer motif encoding polynucleotide
  source 1..21: mol_type = other DNA
atggttactaatacgaatacg

SEQ ID NO: 7793 - protein, 7 aa, synthetic construct
  REGION 1..7: note = n-mer motif
RIASNLA

SEQ ID NO: 7794 - DNA, 21 bp, synthetic construct
  misc_feature 1..21: note = n-mer motif encoding polynucleotide
  source 1..21: mol_type = other DNA
aggattgcttctaatctggcg

SEQ ID NO: 7795 - protein, 7 aa, synthetic construct
  REGION 1..7: note = n-mer motif
VVAGTNS

SEQ ID NO: 7796 - DNA, 21 bp, synthetic construct
  misc_feature 1..21: note = n-mer motif encoding polynucleotide
  source 1..21: mol_type = other DNA
gtcgttgcaggtacaaactcg

SEQ ID NO: 7797 - protein, 7 aa, synthetic construct
  REGION 1..7: note = n-mer motif
GVAATNS

SEQ ID NO: 7798 - DNA, 21 bp, synthetic construct
  misc_feature 1..21: note = n-mer motif encoding polynucleotide
  source 1..21: mol_type = other DNA
ggggtggctgcgacgaattct

SEQ ID NO: 7799 - protein, 7 aa, synthetic construct
  REGION 1..7: note = n-mer motif
KGSVTPM

SEQ ID NO: 7800 - DNA, 21 bp, synthetic construct
  misc_feature 1..21: note = n-mer motif encoding polynucleotide
  source 1..21: mol_type = other DNA
aagggttctgttactcctatg

SEQ ID NO: 7801 - protein, 7 aa, synthetic construct
  REGION 1..7: note = n-mer motif
HDTSASV

SEQ ID NO: 7802 - DNA, 21 bp, synthetic construct
  misc_feature 1..21: note = n-mer motif encoding polynucleotide
  source 1..21: mol_type = other DNA
catgatactagtgctagtgtt

SEQ ID NO: 7803 - protein, 7 aa, synthetic construct
  REGION 1..7: note = n-mer motif
SLAITER

SEQ ID NO: 7804 - DNA, 21 bp, synthetic construct
  misc_feature 1..21: note = n-mer motif encoding polynucleotide
  source 1..21: mol_type = other DNA
agtttggcgattactgagcgg

SEQ ID NO: 7805 - protein, 7 aa, synthetic construct
  REGION 1..7: note = n-mer motif
HGRDALV

SEQ ID NO: 7806 - DNA, 21 bp, synthetic construct
  misc_feature 1..21: note = n-mer motif encoding polynucleotide
  source 1..21: mol_type = other DNA
catgggcgggatgctcttgtg

SEQ ID NO: 7807 - protein, 7 aa, synthetic construct
  REGION 1..7: note = n-mer motif
DIAGLGI

SEQ ID NO: 7808 - DNA, 21 bp, synthetic construct
  misc_feature 1..21: note = n-mer motif encoding polynucleotide
  source 1..21: mol_type = other DNA
gatattgccgggcttgggatt

SEQ ID NO: 7809 - protein, 7 aa, synthetic construct
  REGION 1..7: note = n-mer motif
ANQLAPV

SEQ ID NO: 7810 - DNA, 21 bp, synthetic construct
  misc_feature 1..21: note = n-mer motif encoding polynucleotide
  source 1..21: mol_type = other DNA
gccaaccaattggcccccgtg

SEQ ID NO: 7811 - protein, 7 aa, synthetic construct
  REGION 1..7: note = n-mer motif
NGASLAS

SEQ ID NO: 7812 - DNA, 21 bp, synthetic construct
  misc_feature 1..21: note = n-mer motif encoding polynucleotide
  source 1..21: mol_type = other DNA
aacggagcttccctcgcaagc

SEQ ID NO: 7813 - protein, 6 aa, synthetic construct
  REGION 1..6: note = n-mer motif
KMSAYV

SEQ ID NO: 7814 - DNA, 21 bp, synthetic construct
  misc_feature 1..21: note = n-mer motif encoding polynucleotide
  source 1..21: mol_type = other DNA
tgaaagatgtccgcttatgtg

SEQ ID NO: 7815 - protein, 7 aa, synthetic construct
  REGION 1..7: note = n-mer motif
GVAGRIL

SEQ ID NO: 7816 - DNA, 21 bp, synthetic construct
  misc_feature 1..21: note = n-mer motif encoding polynucleotide
  source 1..21: mol_type = other DNA
ggggtggctgggcgtattctg

SEQ ID NO: 7817 - protein, 7 aa, synthetic construct
  REGION 1..7: note = n-mer motif
TLAISGR

SEQ ID NO: 7818 - DNA, 21 bp, synthetic construct
  misc_feature 1..21: note = n-mer motif encoding polynucleotide
  source 1..21: mol_type = other DNA
actttggcgatttctgggcgg

SEQ ID NO: 7819 - protein, 7 aa, synthetic construct
  REGION 1..7: note = n-mer motif
NLHTAEA

SEQ ID NO: 7820 - DNA, 21 bp, synthetic construct
  misc_feature 1..21: note = n-mer motif encoding polynucleotide
  source 1..21: mol_type = other DNA
aacctccacactgctgaagcg

SEQ ID NO: 7821 - protein, 7 aa, synthetic construct
  REGION 1..7: note = n-mer motif
SIAVGLS

SEQ ID NO: 7822 - DNA, 21 bp, synthetic construct
  misc_feature 1..21: note = n-mer motif encoding polynucleotide
  source 1..21: mol_type = other DNA
agtattgcggtgggtttgtcg

SEQ ID NO: 7823 - protein, 7 aa, synthetic construct
  REGION 1..7: note = n-mer motif
TGQQVSI

SEQ ID NO: 7824 - DNA, 21 bp, synthetic construct
  misc_feature 1..21: note = n-mer motif encoding polynucleotide
  source 1..21: mol_type = other DNA
actgggcagcaggttagtatt

SEQ ID NO: 7825 - protein, 7 aa, synthetic construct
  REGION 1..7: note = n-mer motif
LPRLGGL

SEQ ID NO: 7826 - DNA, 21 bp, synthetic construct
  misc_feature 1..21: note = n-mer motif encoding polynucleotide
  source 1..21: mol_type = other DNA
cttccgcgtttgggggggctt

SEQ ID NO: 7827 - protein, 7 aa, synthetic construct
  REGION 1..7: note = n-mer motif
DTASTQS

SEQ ID NO: 7828 - DNA, 21 bp, synthetic construct
  misc_feature 1..21: note = n-mer motif encoding polynucleotide
  source 1..21: mol_type = other DNA
gacacagcatctactcaatcc

SEQ ID NO: 7829 - protein, 7 aa, synthetic construct
  REGION 1..7: note = n-mer motif
PQLIVPV

SEQ ID NO: 7830 - DNA, 21 bp, synthetic construct
  misc_feature 1..21: note = n-mer motif encoding polynucleotide
  source 1..21: mol_type = other DNA
cctcagcttattgttcctgtg

SEQ ID NO: 7831 - protein, 7 aa, synthetic construct
  REGION 1..7: note = n-mer motif
GLNDHVA

SEQ ID NO: 7832 - DNA, 21 bp, synthetic construct
  misc_feature 1..21: note = n-mer motif encoding polynucleotide
  source 1..21: mol_type = other DNA
ggtctgaatgatcatgtggcg

SEQ ID NO: 7833 - protein, 7 aa, synthetic construct
  REGION 1..7: note = n-mer motif
RDEAYRA

SEQ ID NO: 7834 - DNA, 21 bp, synthetic construct
  misc_feature 1..21: note = n-mer motif encoding polynucleotide
  source 1..21: mol_type = other DNA
agggatgaggcttatcgtgcg

SEQ ID NO: 7835 - protein, 7 aa, synthetic construct
  REGION 1..7: note = n-mer motif
RISPEGT

SEQ ID NO: 7836 - DNA, 21 bp, synthetic construct
  misc_feature 1..21: note = n-mer motif encoding polynucleotide
  source 1..21: mol_type = other DNA
cgtatatcaccggaaggcact

SEQ ID NO: 7837 - protein, 7 aa, synthetic construct
  REGION 1..7: note = n-mer motif
HSEGVGR

SEQ ID NO: 7838 - DNA, 21 bp, synthetic construct
  misc_feature 1..21: note = n-mer motif encoding polynucleotide
  source 1..21: mol_type = other DNA
catagtgagggtgttgggcgg

SEQ ID NO: 7839 - protein, 7 aa, synthetic construct
  REGION 1..7: note = n-mer motif
KGSDNTM

SEQ ID NO: 7840 - DNA, 21 bp, synthetic construct
  misc_feature 1..21: note = n-mer motif encoding polynucleotide
  source 1..21: mol_type = other DNA
aagggttctgataatactatg

SEQ ID NO: 7841 - protein, 7 aa, synthetic construct
  REGION 1..7: note = n-mer motif
LPNGGGF

SEQ ID NO: 7842 - DNA, 21 bp, synthetic construct
  misc_feature 1..21: note = n-mer motif encoding polynucleotide
  source 1..21: mol_type = other DNA
ctgccgaatgggggggggttt

SEQ ID NO: 7843 - protein, 7 aa, synthetic construct
  REGION 1..7: note = n-mer motif
AVTNPLM

SEQ ID NO: 7844 - DNA, 21 bp, synthetic construct
  misc_feature 1..21: note = n-mer motif encoding polynucleotide
  source 1..21: mol_type = other DNA
gcggttactaatcctttgatg

SEQ ID NO: 7845 - protein, 7 aa, synthetic construct
  REGION 1..7: note = n-mer motif
VTVAGSV

SEQ ID NO: 7846 - DNA, 21 bp, synthetic construct
  misc_feature 1..21: note = n-mer motif encoding polynucleotide
  source 1..21: mol_type = other DNA
gttacggtggctggttcggtg

SEQ ID NO: 7847 - protein, 7 aa, synthetic construct
  REGION 1..7: note = n-mer motif
RDDQGIP

SEQ ID NO: 7848 - DNA, 21 bp, synthetic construct
  misc_feature 1..21: note = n-mer motif encoding polynucleotide
  source 1..21: mol_type = other DNA
cgggatgatcaggggattccg

SEQ ID NO: 7849 - protein, 7 aa, synthetic construct
  REGION 1..7: note = n-mer motif
HTLSTGV

SEQ ID NO: 7850 - DNA, 21 bp, synthetic construct
  misc_feature 1..21: note = n-mer motif encoding polynucleotide
  source 1..21: mol_type = other DNA
cacaccctaagcacgggagta

SEQ ID NO: 7851 - protein, 7 aa, synthetic construct
  REGION 1..7: note = n-mer motif
SGGTRGP

SEQ ID NO: 7852 - DNA, 21 bp, synthetic construct
  misc_feature 1..21: note = n-mer motif encoding polynucleotide
  source 1..21: mol_type = other DNA
tctggtgggactcgtggtcct

SEQ ID NO: 7853 - protein, 7 aa, synthetic construct
  REGION 1..7: note = n-mer motif
RHIADAS

SEQ ID NO: 7854 - DNA, 21 bp, synthetic construct
  misc_feature 1..21: note = n-mer motif encoding polynucleotide
  source 1..21: mol_type = other DNA
agacacatagcggacgcgtcg

SEQ ID NO: 7855 - protein, 7 aa, synthetic construct
  REGION 1..7: note = n-mer motif
SGISFLA

SEQ ID NO: 7856 - DNA, 21 bp, synthetic construct
  misc_feature 1..21: note = n-mer motif encoding polynucleotide
  source 1..21: mol_type = other DNA
agcggaatcagcttcttggct

SEQ ID NO: 7857 - protein, 7 aa, synthetic construct
  REGION 1..7: note = n-mer motif
SALTQGY

SEQ ID NO: 7858 - DNA, 21 bp, synthetic construct
  misc_feature 1..21: note = n-mer motif encoding polynucleotide
  source 1..21: mol_type = other DNA
tcggcgctaacccaaggatac

SEQ ID NO: 7859 - protein, 7 aa, synthetic construct
  REGION 1..7: note = n-mer motif
LNGAPLL

SEQ ID NO: 7860 - DNA, 21 bp, synthetic construct
  misc_feature 1..21: note = n-mer motif encoding polynucleotide
  source 1..21: mol_type = other DNA
ctgaatggtgcgccgttgctg

SEQ ID NO: 7861 - protein, 7 aa, synthetic construct
  REGION 1..7: note = n-mer motif
STVGINV

SEQ ID NO: 7862 - DNA, 21 bp, synthetic construct
  misc_feature 1..21: note = n-mer motif encoding polynucleotide
  source 1..21: mol_type = other DNA
agtacggtcgggatcaacgtt

SEQ ID NO: 7863 - protein, 7 aa, synthetic construct
  REGION 1..7: note = n-mer motif
QEQGTTT

SEQ ID NO: 7864 - DNA, 21 bp, synthetic construct
  misc_feature 1..21: note = n-mer motif encoding polynucleotide
  source 1..21: mol_type = other DNA
caggagcagggtacgactact

SEQ ID NO: 7865 - protein, 7 aa, synthetic construct
  REGION 1..7: note = n-mer motif
MIGGHVQ

SEQ ID NO: 7866 - DNA, 21 bp, synthetic construct
  misc_feature 1..21: note = n-mer motif encoding polynucleotide
  source 1..21: mol_type = other DNA
atgattgggggtcatgttcag

SEQ ID NO: 7867 - protein, 7 aa, synthetic construct
  REGION 1..7: note = n-mer motif
RVLTSDV

SEQ ID NO: 7868 - DNA, 21 bp, synthetic construct
  misc_feature 1..21: note = n-mer motif encoding polynucleotide
  source 1..21: mol_type = other DNA
cgtgttctgacgtctgatgtg

SEQ ID NO: 7869 - protein, 7 aa, synthetic construct
  REGION 1..7: note = n-mer motif
GFGLTED

SEQ ID NO: 7870 - DNA, 21 bp, synthetic construct
  misc_feature 1..21: note = n-mer motif encoding polynucleotide
  source 1..21: mol_type = other DNA
gggtttgggttgacggaggat

SEQ ID NO: 7871 - protein, 7 aa, synthetic construct
  REGION 1..7: note = n-mer motif
DAQSRLA

SEQ ID NO: 7872 - DNA, 21 bp, synthetic construct
  misc_feature 1..21: note = n-mer motif encoding polynucleotide
  source 1..21: mol_type = other DNA
gatgctcagtcgcggttggcg

SEQ ID NO: 7873 - protein, 7 aa, synthetic construct
  REGION 1..7: note = n-mer motif
RESANAD

SEQ ID NO: 7874 - DNA, 21 bp, synthetic construct
  misc_feature 1..21: note = n-mer motif encoding polynucleotide
  source 1..21: mol_type = other DNA
cgtgagtctgcgaatgctgat

SEQ ID NO: 7875 - protein, 7 aa, synthetic construct
  REGION 1..7: note = n-mer motif
LLHGIIA

SEQ ID NO: 7876 - DNA, 21 bp, synthetic construct
  misc_feature 1..21: note = n-mer motif encoding polynucleotide
  source 1..21: mol_type = other DNA
cttttacacggaataatcgcc

SEQ ID NO: 7877 - protein, 7 aa, synthetic construct
  REGION 1..7: note = n-mer motif
GMGASSK

SEQ ID NO: 7878 - DNA, 21 bp, synthetic construct
  misc_feature 1..21: note = n-mer motif encoding polynucleotide
  source 1..21: mol_type = other DNA
ggtatgggggcgtcttctaag

SEQ ID NO: 7879 - protein, 7 aa, synthetic construct
  REGION 1..7: note = n-mer motif
RNEGINQ

SEQ ID NO: 7880 - DNA, 21 bp, synthetic construct
  misc_feature 1..21: note = n-mer motif encoding polynucleotide
  source 1..21: mol_type = other DNA
cgtaatgagggtattaatcag

SEQ ID NO: 7881 - protein, 7 aa, synthetic construct
  REGION 1..7: note = n-mer motif
PGVAMVT

SEQ ID NO: 7882 - DNA, 21 bp, synthetic construct
  misc_feature 1..21: note = n-mer motif encoding polynucleotide
  source 1..21: mol_type = other DNA
cccggggtcgctatggtaact

SEQ ID NO: 7883 - protein, 7 aa, synthetic construct
  REGION 1..7: note = n-mer motif
ASQLTQT

SEQ ID NO: 7884 - DNA, 21 bp, synthetic construct
  misc_feature 1..21: note = n-mer motif encoding polynucleotide
  source 1..21: mol_type = other DNA
gcgtctcagcttactcagact

SEQ ID NO: 7885 - protein, 7 aa, synthetic construct
  REGION 1..7: note = n-mer motif
ALGDQAR

SEQ ID NO: 7886 - DNA, 21 bp, synthetic construct
  misc_feature 1..21: note = n-mer motif encoding polynucleotide
  source 1..21: mol_type = other DNA
gcgttaggggaccaagcgcgt

SEQ ID NO: 7887 - protein, 7 aa, synthetic construct
  REGION 1..7: note = n-mer motif
LTDVTQM

SEQ ID NO: 7888 - DNA, 21 bp, synthetic construct
  misc_feature 1..21: note = n-mer motif encoding polynucleotide
  source 1..21: mol_type = other DNA
ttaaccgacgtcacacaaatg

SEQ ID NO: 7889 - protein, 7 aa, synthetic construct
  REGION 1..7: note = n-mer motif
DVAISMR

SEQ ID NO: 7890 - DNA, 21 bp, synthetic construct
  misc_feature 1..21: note = n-mer motif encoding polynucleotide
  source 1..21: mol_type = other DNA
gacgtagcgatatccatgcga

SEQ ID NO: 7891 - protein, 7 aa, synthetic construct
  REGION 1..7: note = n-mer motif
YGSNVLS

SEQ ID NO: 7892 - DNA, 21 bp, synthetic construct
  misc_feature 1..21: note = n-mer motif encoding polynucleotide
  source 1..21: mol_type = other DNA
tacggttctaacgtcctctca

SEQ ID NO: 7893 - protein, 7 aa, synthetic construct
  REGION 1..7: note = n-mer motif
VYHGGVD

SEQ ID NO: 7894 - DNA, 21 bp, synthetic construct
  misc_feature 1..21: note = n-mer motif encoding polynucleotide
  source 1..21: mol_type = other DNA
gtgtatcatggtggtgtggat

SEQ ID NO: 7895 - protein, 7 aa, synthetic construct
  REGION 1..7: note = n-mer motif
SFDTYGA

SEQ ID NO: 7896 - DNA, 21 bp, synthetic construct
  misc_feature 1..21: note = n-mer motif encoding polynucleotide
  source 1..21: mol_type = other DNA
tccttcgacacttacggggcc

SEQ ID NO: 7897 - protein, 7 aa, synthetic construct
  REGION 1..7: note = n-mer motif
PTTNPLL

SEQ ID NO: 7898 - DNA, 21 bp, synthetic construct
  misc_feature 1..21: note = n-mer motif encoding polynucleotide
  source 1..21: mol_type = other DNA
ccgactactaatccgcttctg

SEQ ID NO: 7899 - protein, 7 aa, synthetic construct
  REGION 1..7: note = n-mer motif
RVAMSVT

SEQ ID NO: 7900 - DNA, 21 bp, synthetic construct
  misc_feature 1..21: note = n-mer motif encoding polynucleotide
  source 1..21: mol_type = other DNA
agggtggcgatgtctgtgacg

SEQ ID NO: 7901 - protein, 7 aa, synthetic construct
  REGION 1..7: note = n-mer motif
HIVLSHA

SEQ ID NO: 7902 - DNA, 21 bp, synthetic construct
  misc_feature 1..21: note = n-mer motif encoding polynucleotide
  source 1..21: mol_type = other DNA
catattgtgctgagtcatgct

SEQ ID NO: 7903 - protein, 7 aa, synthetic construct
  REGION 1..7: note = n-mer motif
TLQELQL

SEQ ID NO: 7904 - DNA, 21 bp, synthetic construct
  misc_feature 1..21: note = n-mer motif encoding polynucleotide
  source 1..21: mol_type = other DNA
acgttgcaggagttgcagctt

SEQ ID NO: 7905 - protein, 7 aa, synthetic construct
  REGION 1..7: note = n-mer motif
DPSLGSP

SEQ ID NO: 7906 - DNA, 21 bp, synthetic construct
  misc_feature 1..21: note = n-mer motif encoding polynucleotide
  source 1..21: mol_type = other DNA
gatccgtctctgggttctccg

SEQ ID NO: 7907 - protein, 7 aa, synthetic construct
  REGION 1..7: note = n-mer motif
LAGSVVV

SEQ ID NO: 7908 - DNA, 21 bp, synthetic construct
  misc_feature 1..21: note = n-mer motif encoding polynucleotide
  source 1..21: mol_type = other DNA
ctggcgggttcggttgttgtg

SEQ ID NO: 7909 - protein, 7 aa, synthetic construct
  REGION 1..7: note = n-mer motif
ILVDAYA

SEQ ID NO: 7910 - DNA, 21 bp, synthetic construct
  misc_feature 1..21: note = n-mer motif encoding polynucleotide
  source 1..21: mol_type = other DNA
atactagtagacgcgtacgct

SEQ ID NO: 7911 - protein, 7 aa, synthetic construct
  REGION 1..7: note = n-mer motif
GVANVSP

SEQ ID NO: 7912 - DNA, 21 bp, synthetic construct
  misc_feature 1..21: note = n-mer motif encoding polynucleotide
  source 1..21: mol_type = other DNA
ggagttgctaacgtcagccca

SEQ ID NO: 7913 - protein, 7 aa, synthetic construct
  REGION 1..7: note = n-mer motif
RMTLTGD

SEQ ID NO: 7914 - DNA, 21 bp, synthetic construct
  misc_feature 1..21: note = n-mer motif encoding polynucleotide
  source 1..21: mol_type = other DNA
cgtatgactttgactggtgat

SEQ ID NO: 7915 - protein, 7 aa, synthetic construct
  REGION 1..7: note = n-mer motif
SGGVESK

SEQ ID NO: 7916 - DNA, 21 bp, synthetic construct
  misc_feature 1..21: note = n-mer motif encoding polynucleotide
  source 1..21: mol_type = other DNA
tctggtggtgttgagtcgaag

SEQ ID NO: 7917 - protein, 7 aa, synthetic construct
  REGION 1..7: note = n-mer motif
QIHDTAL

SEQ ID NO: 7918 - DNA, 21 bp, synthetic construct
  misc_feature 1..21: note = n-mer motif encoding polynucleotide
  source 1..21: mol_type = other DNA
caaatccacgacacagcgctc

SEQ ID NO: 7919 - protein, 7 aa, synthetic construct
  REGION 1..7: note = n-mer motif
FQVEQIM

SEQ ID NO: 7920 - DNA, 21 bp, synthetic construct
  misc_feature 1..21: note = n-mer motif encoding polynucleotide
  source 1..21: mol_type = other DNA
tttcaggttgagcagattatg

SEQ ID NO: 7921 - protein, 7 aa, synthetic construct
  REGION 1..7: note = n-mer motif
GLVQMSS

SEQ ID NO: 7922 - DNA, 21 bp, synthetic construct
  misc_feature 1..21: note = n-mer motif encoding polynucleotide
  source 1..21: mol_type = other DNA
ggtctggtgcagatgtcttct

SEQ ID NO: 7923 - protein, 7 aa, synthetic construct
  REGION 1..7: note = n-mer motif
FPSMSGK

SEQ ID NO: 7924 - DNA, 21 bp, synthetic construct
  misc_feature 1..21: note = n-mer motif encoding polynucleotide
  source 1..21: mol_type = other DNA
ttcccaagcatgtcggggaaa

SEQ ID NO: 7925 - protein, 7 aa, synthetic construct
  REGION 1..7: note = n-mer motif
VSNGHFV

SEQ ID NO: 7926 - DNA, 21 bp, synthetic construct
  misc_feature 1..21: note = n-mer motif encoding polynucleotide
  source 1..21: mol_type = other DNA
gttagtaatgggcattttgtt

SEQ ID NO: 7927 - protein, 7 aa, synthetic construct
  REGION 1..7: note = n-mer motif
STVGSSP

SEQ ID NO: 7928 - DNA, 21 bp, synthetic construct
  misc_feature 1..21: note = n-mer motif encoding polynucleotide
  source 1..21: mol_type = other DNA
agtacggtggggtcgtcgccg

SEQ ID NO: 7929 - protein, 7 aa, synthetic construct
  REGION 1..7: note = n-mer motif
YLVTADN

SEQ ID NO: 7930 - DNA, 21 bp, synthetic construct
  misc_feature 1..21: note = n-mer motif encoding polynucleotide
  source 1..21: mol_type = other DNA
tatttggttactgctgataat

SEQ ID NO: 7931 - protein, 7 aa, synthetic construct
  REGION 1..7: note = n-mer motif
TTRADPA

SEQ ID NO: 7932 - DNA, 21 bp, synthetic construct
  misc_feature 1..21: note = n-mer motif encoding polynucleotide
  source 1..21: mol_type = other DNA
actactcgggctgatcctgcg

SEQ ID NO: 7933 - protein, 7 aa, synthetic construct
  REGION 1..7: note = n-mer motif
PLVPQGG

SEQ ID NO: 7934 - DNA, 21 bp, synthetic construct
  misc_feature 1..21: note = n-mer motif encoding polynucleotide
  source 1..21: mol_type = other DNA
cccttagtacctcaaggcggt

SEQ ID NO: 7935 - protein, 7 aa, synthetic construct
  REGION 1..7: note = n-mer motif
GARMVMT

SEQ ID NO: 7936 - DNA, 21 bp, synthetic construct
  misc_feature 1..21: note = n-mer motif encoding polynucleotide
  source 1..21: mol_type = other DNA
ggtgcgcggatggttatgact

SEQ ID NO: 7937 - protein, 7 aa, synthetic construct
  REGION 1..7: note = n-mer motif
MKTQIEL

SEQ ID NO: 7938 - DNA, 21 bp, synthetic construct
  misc_feature 1..21: note = n-mer motif encoding polynucleotide
  source 1..21: mol_type = other DNA
atgaaaacgcaaatagaactc

SEQ ID NO: 7939 - protein, 7 aa, synthetic construct
  REGION 1..7: note = n-mer motif
VNHGGVD

SEQ ID NO: 7940 - DNA, 21 bp, synthetic construct
  misc_feature 1..21: note = n-mer motif encoding polynucleotide
  source 1..21: mol_type = other DNA
gtaaaccacggaggagttgac

SEQ ID NO: 7941 - protein, 7 aa, synthetic construct
  REGION 1..7: note = n-mer motif
MVQSGLT

SEQ ID NO: 7942 - DNA, 21 bp, synthetic construct
  misc_feature 1..21: note = n-mer motif encoding polynucleotide
  source 1..21: mol_type = other DNA
atggttcagtcggggttgacg

SEQ ID NO: 7943 - protein, 7 aa, synthetic construct
  REGION 1..7: note = n-mer motif
QYAVSGG

SEQ ID NO: 7944 - DNA, 21 bp, synthetic construct
  misc_feature 1..21: note = n-mer motif encoding polynucleotide
  source 1..21: mol_type = other DNA
caatacgcagtgagcggcggt

SEQ ID NO: 7945 - protein, 7 aa, synthetic construct
  REGION 1..7: note = n-mer motif
MTSGNLM

SEQ ID NO: 7946 - DNA, 21 bp, synthetic construct
  misc_feature 1..21: note = n-mer motif encoding polynucleotide
  source 1..21: mol_type = other DNA
atgacctctggcaacctcatg

SEQ ID NO: 7947 - protein, 7 aa, synthetic construct
  REGION 1..7: note = n-mer motif
TTLAHPA

SEQ ID NO: 7948 - DNA, 21 bp, synthetic construct
  misc_feature 1..21: note = n-mer motif encoding polynucleotide
  source 1..21: mol_type = other DNA
actactctggctcatcctgcg

SEQ ID NO: 7949 - protein, 7 aa, synthetic construct
  REGION 1..7: note = n-mer motif
REQQKAW

SEQ ID NO: 7950 - DNA, 21 bp, synthetic construct
  misc_feature 1..21: note = n-mer motif encoding polynucleotide
  source 1..21: mol_type = other DNA
cgagaacaacaaaaagcctgg

SEQ ID NO: 7951 - protein, 7 aa, synthetic construct
  REGION 1..7: note = n-mer motif
VTTLSPV

SEQ ID NO: 7952 - DNA, 21 bp, synthetic construct
  misc_feature 1..21: note = n-mer motif encoding polynucleotide
  source 1..21: mol_type = other DNA
gtgactacgctttctcctgtg

SEQ ID NO: 7953 - protein, 7 aa, synthetic construct
  REGION 1..7: note = n-mer motif
LQDRTTL

SEQ ID NO: 7954 - DNA, 21 bp, synthetic construct
  misc_feature 1..21: note = n-mer motif encoding polynucleotide
  source 1..21: mol_type = other DNA
ctccaagaccgcactactctc

SEQ ID NO: 7955 - protein, 7 aa, synthetic construct
  REGION 1..7: note = n-mer motif
SLGALVA

SEQ ID NO: 7956 - DNA, 21 bp, synthetic construct
  misc_feature 1..21: note = n-mer motif encoding polynucleotide
  source 1..21: mol_type = other DNA
tcgctgggtgctctggttgct

SEQ ID NO: 7957 - protein, 7 aa, synthetic construct
  REGION 1..7: note = n-mer motif
GADDAAL

SEQ ID NO: 7958 - DNA, 21 bp, synthetic construct
  misc_feature 1..21: note = n-mer motif encoding polynucleotide
  source 1..21: mol_type = other DNA
ggagccgacgacgcagccctc

SEQ ID NO: 7959 - protein, 7 aa, synthetic construct
  REGION 1..7: note = n-mer motif
IGPRREV

SEQ ID NO: 7960 - DNA, 21 bp, synthetic construct
  misc_feature 1..21: note = n-mer motif encoding polynucleotide
  source 1..21: mol_type = other DNA
ataggacctcgccgtgaagta

SEQ ID NO: 7961 - protein, 7 aa, synthetic construct
  REGION 1..7: note = n-mer motif
QSQTAVA

SEQ ID NO: 7962 - DNA, 21 bp, synthetic construct
  misc_feature 1..21: note = n-mer motif encoding polynucleotide
  source 1..21: mol_type = other DNA
cagtctcagacggctgttgct

SEQ ID NO: 7963 - protein, 7 aa, synthetic construct
  REGION 1..7: note = n-mer motif
VDFGDHT

SEQ ID NO: 7964 - DNA, 21 bp, synthetic construct
  misc_feature 1..21: note = n-mer motif encoding polynucleotide
  source 1..21: mol_type = other DNA
gtagacttcggcgaccacacc

SEQ ID NO: 7965 - protein, 7 aa, synthetic construct
  REGION 1..7: note = n-mer motif
SLRDTHY

SEQ ID NO: 7966 - DNA, 21 bp, synthetic construct
  misc_feature 1..21: note = n-mer motif encoding polynucleotide
  source 1..21: mol_type = other DNA
agtcttcgggatactcattat

SEQ ID NO: 7967 - protein, 7 aa, synthetic construct
  REGION 1..7: note = n-mer motif
YEHSGLL

SEQ ID NO: 7968 - DNA, 21 bp, synthetic construct
  misc_feature 1..21: note = n-mer motif encoding polynucleotide
  source 1..21: mol_type = other DNA
tatgagcattctggtcttttg

SEQ ID NO: 7969 - protein, 7 aa, synthetic construct
  REGION 1..7: note = n-mer motif
VTELTRF

SEQ ID NO: 7970 - DNA, 21 bp, synthetic construct
  misc_feature 1..21: note = n-mer motif encoding polynucleotide
  source 1..21: mol_type = other DNA
gtgactgagcttacgcggttt

SEQ ID NO: 7971 - protein, 7 aa, synthetic construct
  REGION 1..7: note = n-mer motif
LTHLRVS

SEQ ID NO: 7972 - DNA, 21 bp, synthetic construct
  misc_feature 1..21: note = n-mer motif encoding polynucleotide
  source 1..21: mol_type = other DNA
ctgactcaccttcgtgtcagc

SEQ ID NO: 7973 - protein, 7 aa, synthetic construct
  REGION 1..7: note = n-mer motif
QRSDSVM

SEQ ID NO: 7974 - DNA, 21 bp, synthetic construct
  misc_feature 1..21: note = n-mer motif encoding polynucleotide
  source 1..21: mol_type = other DNA
cagcggtcggatagtgtgatg

SEQ ID NO: 7975 - protein, 7 aa, synthetic construct
  REGION 1..7: note = n-mer motif
LSKEHAP

SEQ ID NO: 7976 - DNA, 21 bp, synthetic construct
  misc_feature 1..21: note = n-mer motif encoding polynucleotide
  source 1..21: mol_type = other DNA
ttgagtaaggagcatgctcct

SEQ ID NO: 7977 - protein, 7 aa, synthetic construct
  REGION 1..7: note = n-mer motif
PDGAAPM

SEQ ID NO: 7978 - DNA, 21 bp, synthetic construct
  misc_feature 1..21: note = n-mer motif encoding polynucleotide
  source 1..21: mol_type = other DNA
cctgatggtgcggctcctatg

SEQ ID NO: 7979 - protein, 7 aa, synthetic construct
  REGION 1..7: note = n-mer motif
LTTPIEL

SEQ ID NO: 7980 - DNA, 21 bp, synthetic construct
  misc_feature 1..21: note = n-mer motif encoding polynucleotide
  source 1..21: mol_type = other DNA
ctaactacccctatagaactc

SEQ ID NO: 7981 - protein, 7 aa, synthetic construct
  REGION 1..7: note = n-mer motif
AAVVPRY

SEQ ID NO: 7982 - DNA, 21 bp, synthetic construct
  misc_feature 1..21: note = n-mer motif encoding polynucleotide
  source 1..21: mol_type = other DNA
gcagcagtagtaccacgatac

SEQ ID NO: 7983 - protein, 7 aa, synthetic construct
  REGION 1..7: note = n-mer motif
VVLSLAT

SEQ ID NO: 7984 - DNA, 21 bp, synthetic construct
  misc_feature 1..21: note = n-mer motif encoding polynucleotide
  source 1..21: mol_type = other DNA
gttgtcttaagtctagccact

SEQ ID NO: 7985 - protein, 7 aa, synthetic construct
  REGION 1..7: note = n-mer motif
QDAHVAI

SEQ ID NO: 7986 - DNA, 21 bp, synthetic construct
  misc_feature 1..21: note = n-mer motif encoding polynucleotide
  source 1..21: mol_type = other DNA
caggatgcgcatgtggctatt

SEQ ID NO: 7987 - protein, 7 aa, synthetic construct
  REGION 1..7: note = n-mer motif
LGHANGL

SEQ ID NO: 7988 - DNA, 21 bp, synthetic construct
  misc_feature 1..21: note = n-mer motif encoding polynucleotide
  source 1..21: mol_type = other DNA
ttagggcacgcaaacggactt

SEQ ID NO: 7989 - protein, 7 aa, synthetic construct
  REGION 1..7: note = n-mer motif
SPQGVLA

SEQ ID NO: 7990 - DNA, 21 bp, synthetic construct
  misc_feature 1..21: note = n-mer motif encoding polynucleotide
  source 1..21: mol_type = other DNA
tcgccgcagggggttcttgct

SEQ ID NO: 7991 - protein, 7 aa, synthetic construct
  REGION 1..7: note = n-mer motif
LSLTMPA

SEQ ID NO: 7992 - DNA, 21 bp, synthetic construct
  misc_feature 1..21: note = n-mer motif encoding polynucleotide
  source 1..21: mol_type = other DNA
ctctcgcttacaatgcctgcc

SEQ ID NO: 7993 - protein, 7 aa, synthetic construct
  REGION 1..7: note = n-mer motif
YVGSPLV

SEQ ID NO: 7994 - DNA, 21 bp, synthetic construct
  misc_feature 1..21: note = n-mer motif encoding polynucleotide
  source 1..21: mol_type = other DNA
tatgttggttctccgttggtg

SEQ ID NO: 7995 - protein, 7 aa, synthetic construct
  REGION 1..7: note = n-mer motif
QILGASS

SEQ ID NO: 7996 - DNA, 21 bp, synthetic construct
  misc_feature 1..21: note = n-mer motif encoding polynucleotide
  source 1..21: mol_type = other DNA
caaatcttaggggcctcgagt

SEQ ID NO: 7997 - protein, 7 aa, synthetic construct
  REGION 1..7: note = n-mer motif
NSGSMHT

SEQ ID NO: 7998 - DNA, 21 bp, synthetic construct
  misc_feature 1..21: note = n-mer motif encoding polynucleotide
  source 1..21: mol_type = other DNA
aactcaggaagcatgcacact

SEQ ID NO: 7999 - protein, 7 aa, synthetic construct
  REGION 1..7: note = n-mer motif
GVLGQTD

SEQ ID NO: 8000 - DNA, 21 bp, synthetic construct
  misc_feature 1..21: note = n-mer motif encoding polynucleotide
  source 1..21: mol_type = other DNA
ggtgtgttggggcagactgat

SEQ ID NO: 8001 - protein, 7 aa, synthetic construct
  REGION 1..7: note = n-mer motif
MNVGHVL

SEQ ID NO: 8002 - DNA, 21 bp, synthetic construct
  misc_feature 1..21: note = n-mer motif encoding polynucleotide
  source 1..21: mol_type = other DNA
atgaacgtagggcacgtcctc

SEQ ID NO: 8003 - protein, 7 aa, synthetic construct
  REGION 1..7: note = n-mer motif
PNTRDPI

SEQ ID NO: 8004 - DNA, 21 bp, synthetic construct
  misc_feature 1..21: note = n-mer motif encoding polynucleotide
  source 1..21: mol_type = other DNA
cctaatacgcgggatccgatt

SEQ ID NO: 8005 - protein, 7 aa, synthetic construct
  REGION 1..7: note = n-mer motif
VEKRHMV

SEQ ID NO: 8006 - DNA, 21 bp, synthetic construct
  misc_feature 1..21: note = n-mer motif encoding polynucleotide
  source 1..21: mol_type = other DNA
gtggagaagaggcatatggtg

SEQ ID NO: 8007 - protein, 7 aa, synthetic construct
  REGION 1..7: note = n-mer motif
VVSGIPN

SEQ ID NO: 8008 - DNA, 21 bp, synthetic construct
  misc_feature 1..21: note = n-mer motif encoding polynucleotide
  source 1..21: mol_type = other DNA
gtggtgtctggtattccgaat

SEQ ID NO: 8009 - protein, 7 aa, synthetic construct
  REGION 1..7: note = n-mer motif
KNGGHDL

SEQ ID NO: 8010 - DNA, 21 bp, synthetic construct
  misc_feature 1..21: note = n-mer motif encoding polynucleotide
  source 1..21: mol_type = other DNA
aaaaacggtgggcacgaccta

SEQ ID NO: 8011 - protein, 7 aa, synthetic construct
  REGION 1..7: note = n-mer motif
YESTRGQ

SEQ ID NO: 8012 - DNA, 21 bp, synthetic construct
  misc_feature 1..21: note = n-mer motif encoding polynucleotide
  source 1..21: mol_type = other DNA
tatgagtcgacgaggggtcag

SEQ ID NO: 8013 - protein, 7 aa, synthetic construct
  REGION 1..7: note = n-mer motif
NALGDGY

SEQ ID NO: 8014 - DNA, 21 bp, synthetic construct
  misc_feature 1..21: note = n-mer motif encoding polynucleotide
  source 1..21: mol_type = other DNA
aacgcgctgggcgacggctac

SEQ ID NO: 8015 - protein, 7 aa, synthetic construct
  REGION 1..7: note = n-mer motif
GLYDAAT

SEQ ID NO: 8016 - DNA, 21 bp, synthetic construct
  misc_feature 1..21: note = n-mer motif encoding polynucleotide
  source 1..21: mol_type = other DNA
gggctttatgatgcggcgact

SEQ ID NO: 8017 - protein, 7 aa, synthetic construct
  REGION 1..7: note = n-mer motif
LVAGQAM

SEQ ID NO: 8018 - DNA, 21 bp, synthetic construct
  misc_feature 1..21: note = n-mer motif encoding polynucleotide
  source 1..21: mol_type = other DNA
ctggtggcggggcaggctatg

SEQ ID NO: 8019 - protein, 7 aa, synthetic construct
  REGION 1..7: note = n-mer motif
DSRTVDS

SEQ ID NO: 8020 - DNA, 21 bp, synthetic construct
  misc_feature 1..21: note = n-mer motif encoding polynucleotide
  source 1..21: mol_type = other DNA
gactctcgaaccgtcgactca

SEQ ID NO: 8021 - protein, 7 aa, synthetic construct
  REGION 1..7: note = n-mer motif
GDRGVVA

SEQ ID NO: 8022 - DNA, 21 bp, synthetic construct
  misc_feature 1..21: note = n-mer motif encoding polynucleotide
  source 1..21: mol_type = other DNA
ggtgataggggggttgtggct

SEQ ID NO: 8023 - protein, 7 aa, synthetic construct
  REGION 1..7: note = n-mer motif
GLESSVP

SEQ ID NO: 8024 - DNA, 21 bp, synthetic construct
  misc_feature 1..21: note = n-mer motif encoding polynucleotide
  source 1..21: mol_type = other DNA
ggccttgaaagctctgtaccc

SEQ ID NO: 8025 - protein, 7 aa, synthetic construct
  REGION 1..7: note = n-mer motif
LSRGAEN

SEQ ID NO: 8026 - DNA, 21 bp, synthetic construct
  misc_feature 1..21: note = n-mer motif encoding polynucleotide
  source 1..21: mol_type = other DNA
ctttcgaggggtgcggagaat

SEQ ID NO: 8027 - protein, 7 aa, synthetic construct
  REGION 1..7: note = n-mer motif
ISMTLLP

SEQ ID NO: 8028 - DNA, 21 bp, synthetic construct
  misc_feature 1..21: note = n-mer motif encoding polynucleotide
  source 1..21: mol_type = other DNA
atttcgatgactctgctgccg

SEQ ID NO: 8029 - protein, 7 aa, synthetic construct
  REGION 1..7: note = n-mer motif
AVGNVLL

SEQ ID NO: 8030 - DNA, 21 bp, synthetic construct
  misc_feature 1..21: note = n-mer motif encoding polynucleotide
  source 1..21: mol_type = other DNA
gctgtggggaatgtgcttttg

SEQ ID NO: 8031 - protein, 7 aa, synthetic construct
  REGION 1..7: note = n-mer motif
QYAVSGG

SEQ ID NO: 8032 - DNA, 21 bp, synthetic construct
  misc_feature 1..21: note = n-mer motif encoding polynucleotide
  source 1..21: mol_type = other DNA
cagtatgctgttagtggtggg

SEQ ID NO: 8033 - protein, 7 aa, synthetic construct
  REGION 1..7: note = n-mer motif
PAQGTLR

SEQ ID NO: 8034 - DNA, 21 bp, synthetic construct
  misc_feature 1..21: note = n-mer motif encoding polynucleotide
  source 1..21: mol_type = other DNA
cctgctcaggggacgcttcgg

SEQ ID NO: 8035 - protein, 7 aa, synthetic construct
  REGION 1..7: note = n-mer motif
DVAVYIR

SEQ ID NO: 8036 - DNA, 21 bp, synthetic construct
  misc_feature 1..21: note = n-mer motif encoding polynucleotide
  source 1..21: mol_type = other DNA
gatgttgctgtttatattcgt

SEQ ID NO: 8037 - protein, 7 aa, synthetic construct
  REGION 1..7: note = n-mer motif
VLQLAAL

SEQ ID NO: 8038 - DNA, 21 bp, synthetic construct
  misc_feature 1..21: note = n-mer motif encoding polynucleotide
  source 1..21: mol_type = other DNA
gttcttcaactcgctgccctc

SEQ ID NO: 8039 - protein, 7 aa, synthetic construct
  REGION 1..7: note = n-mer motif
DDAVSKR

SEQ ID NO: 8040 - DNA, 21 bp, synthetic construct
  misc_feature 1..21: note = n-mer motif encoding polynucleotide
  source 1..21: mol_type = other DNA
gatgatgctgtttctaagcgt

SEQ ID NO: 8041 - protein, 7 aa, synthetic construct
  REGION 1..7: note = n-mer motif
LEDRSAS

SEQ ID NO: 8042 - DNA, 21 bp, synthetic construct
  misc_feature 1..21: note = n-mer motif encoding polynucleotide
  source 1..21: mol_type = other DNA
ttggaggatcggtcggctagt

SEQ ID NO: 8043 - protein, 7 aa, synthetic construct
  REGION 1..7: note = n-mer motif
PSYQGNG

SEQ ID NO: 8044 - DNA, 21 bp, synthetic construct
  misc_feature 1..21: note = n-mer motif encoding polynucleotide
  source 1..21: mol_type = other DNA
ccgagttatcaggggaatggt

SEQ ID NO: 8045 - protein, 7 aa, synthetic construct
  REGION 1..7: note = n-mer motif
LGDSDET

SEQ ID NO: 8046 - DNA, 21 bp, synthetic construct
  misc_feature 1..21: note = n-mer motif encoding polynucleotide
  source 1..21: mol_type = other DNA
ttaggagactcggacgaaacc

SEQ ID NO: 8047 - protein, 7 aa, synthetic construct
  REGION 1..7: note = n-mer motif
GNLLLTA

SEQ ID NO: 8048 - DNA, 21 bp, synthetic construct
  misc_feature 1..21: note = n-mer motif encoding polynucleotide
  source 1..21: mol_type = other DNA
ggtaatttgctgcttactgct

SEQ ID NO: 8049 - protein, 7 aa, synthetic construct
  REGION 1..7: note = n-mer motif
EGVSALL

SEQ ID NO: 8050 - DNA, 21 bp, synthetic construct
  misc_feature 1..21: note = n-mer motif encoding polynucleotide
  source 1..21: mol_type = other DNA
gagggtgtttctgcgttgttg

SEQ ID NO: 8051 - protein, 7 aa, synthetic construct
  REGION 1..7: note = n-mer motif
GHQNGGI

SEQ ID NO: 8052 - DNA, 21 bp, synthetic construct
  misc_feature 1..21: note = n-mer motif encoding polynucleotide
  source 1..21: mol_type = other DNA
gggcaccaaaacggcggaatc

SEQ ID NO: 8053 - protein, 7 aa, synthetic construct
  REGION 1..7: note = n-mer motif
RSISGDW

SEQ ID NO: 8054 - DNA, 21 bp, synthetic construct
  misc_feature 1..21: note = n-mer motif encoding polynucleotide
  source 1..21: mol_type = other DNA
cgttccataagtggcgactgg

SEQ ID NO: 8055 - protein, 7 aa, synthetic construct
  REGION 1..7: note = n-mer motif
YLALTGI

SEQ ID NO: 8056 - DNA, 21 bp, synthetic construct
  misc_feature 1..21: note = n-mer motif encoding polynucleotide
  source 1..21: mol_type = other DNA
tatcttgcgcttacggggatt

SEQ ID NO: 8057 - protein, 7 aa, synthetic construct
  REGION 1..7: note = n-mer motif
LSDGGPL

SEQ ID NO: 8058 - DNA, 21 bp, synthetic construct
  misc_feature 1..21: note = n-mer motif encoding polynucleotide
  source 1..21: mol_type = other DNA
ctctcggacggaggccccctc

SEQ ID NO: 8059 - protein, 7 aa, synthetic construct
  REGION 1..7: note = n-mer motif
LEANVSH

SEQ ID NO: 8060 - DNA, 21 bp, synthetic construct
  misc_feature 1..21: note = n-mer motif encoding polynucleotide
  source 1..21: mol_type = other DNA
cttgaggcgaatgtttcgcat

SEQ ID NO: 8061 - protein, 7 aa, synthetic construct
  REGION 1..7: note = n-mer motif
GLSERAQ

SEQ ID NO: 8062 - DNA, 21 bp, synthetic construct
  misc_feature 1..21: note = n-mer motif encoding polynucleotide
  source 1..21: mol_type = other DNA
ggcctgtccgaacgagcacaa

SEQ ID NO: 8063 - protein, 7 aa, synthetic construct
  REGION 1..7: note = n-mer motif
SGFVVPV

SEQ ID NO: 8064 - DNA, 21 bp, synthetic construct
  misc_feature 1..21: note = n-mer motif encoding polynucleotide
  source 1..21: mol_type = other DNA
tctgggtttgttgtgccggtg

SEQ ID NO: 8065 - protein, 7 aa, synthetic construct
  REGION 1..7: note = n-mer motif
GVMLLTE

SEQ ID NO: 8066 - DNA, 21 bp, synthetic construct
  misc_feature 1..21: note = n-mer motif encoding polynucleotide
  source 1..21: mol_type = other DNA
ggggttatgttgctgactgag

SEQ ID NO: 8067 - protein, 7 aa, synthetic construct
  REGION 1..7: note = n-mer motif
STTSSPS

SEQ ID NO: 8068 - DNA, 21 bp, synthetic construct
  misc_feature 1..21: note = n-mer motif encoding polynucleotide
  source 1..21: mol_type = other DNA
tcgaccacctcatcccctagc

SEQ ID NO: 8069 - protein, 7 aa, synthetic construct
  REGION 1..7: note = n-mer motif
FNGLPAQ

SEQ ID NO: 8070 - DNA, 21 bp, synthetic construct
  misc_feature 1..21: note = n-mer motif encoding polynucleotide
  source 1..21: mol_type = other DNA
ttcaacggtctccccgcacaa

SEQ ID NO: 8071 - protein, 7 aa, synthetic construct
  REGION 1..7: note = n-mer motif
HVSGASL

SEQ ID NO: 8072 - DNA, 21 bp, synthetic construct
  misc_feature 1..21: note = n-mer motif encoding polynucleotide
  source 1..21: mol_type = other DNA
cacgtgtccggcgccagctta

SEQ ID NO: 8073 - protein, 7 aa, synthetic construct
  REGION 1..7: note = n-mer motif
GGDTSRS

SEQ ID NO: 8074 - DNA, 21 bp, synthetic construct
  misc_feature 1..21: note = n-mer motif encoding polynucleotide
  source 1..21: mol_type = other DNA
gggggtgatacgagtcgtagt

SEQ ID NO: 8075 - protein, 7 aa, synthetic construct
  REGION 1..7: note = n-mer motif
AVAGTNS

SEQ ID NO: 8076 - DNA, 21 bp, synthetic construct
  misc_feature 1..21: note = n-mer motif encoding polynucleotide
  source 1..21: mol_type = other DNA
gcagttgcgggtacaaactcg

SEQ ID NO: 8077 - protein, 7 aa, synthetic construct
  REGION 1..7: note = n-mer motif
VMSGTSH

SEQ ID NO: 8078 - DNA, 21 bp, synthetic construct
  misc_feature 1..21: note = n-mer motif encoding polynucleotide
  source 1..21: mol_type = other DNA
gttatgtcgggtactagtcat

SEQ ID NO: 8079 - protein, 7 aa, synthetic construct
  REGION 1..7: note = n-mer motif
YAGIAQG

SEQ ID NO: 8080 - DNA, 21 bp, synthetic construct
  misc_feature 1..21: note = n-mer motif encoding polynucleotide
  source 1..21: mol_type = other DNA
tatgcggggattgctcagggt

SEQ ID NO: 8081 - protein, 7 aa, synthetic construct
  REGION 1..7: note = n-mer motif
MLALAVT

SEQ ID NO: 8082 - DNA, 21 bp, synthetic construct
  misc_feature 1..21: note = n-mer motif encoding polynucleotide
  source 1..21: mol_type = other DNA
atgttggcgctggctgtgacg

SEQ ID NO: 8083 - protein, 7 aa, synthetic construct
  REGION 1..7: note = n-mer motif
AALTREI

SEQ ID NO: 8084 - DNA, 21 bp, synthetic construct
  misc_feature 1..21: note = n-mer motif encoding polynucleotide
  source 1..21: mol_type = other DNA
gctgctcttacgcgggagatt

SEQ ID NO: 8085 - protein, 7 aa, synthetic construct
  REGION 1..7: note = n-mer motif
AIVGMLS

SEQ ID NO: 8086 - DNA, 21 bp, synthetic construct
  misc_feature 1..21: note = n-mer motif encoding polynucleotide
  source 1..21: mol_type = other DNA
gcgattgtgggtatgctgtcg

SEQ ID NO: 8087 - protein, 7 aa, synthetic construct
  REGION 1..7: note = n-mer motif
MANMLSV

SEQ ID NO: 8088 - DNA, 21 bp, synthetic construct
  misc_feature 1..21: note = n-mer motif encoding polynucleotide
  source 1..21: mol_type = other DNA
atggcgaacatgttatcggtg

SEQ ID NO: 8089 - protein, 7 aa, synthetic construct
  REGION 1..7: note = n-mer motif
LLADERV

SEQ ID NO: 8090 - DNA, 21 bp, synthetic construct
  misc_feature 1..21: note = n-mer motif encoding polynucleotide
  source 1..21: mol_type = other DNA
ttactcgcagacgaaagggtc

SEQ ID NO: 8091 - protein, 7 aa, synthetic construct
  REGION 1..7: note = n-mer motif
LSSTDGV

SEQ ID NO: 8092 - DNA, 21 bp, synthetic construct
  misc_feature 1..21: note = n-mer motif encoding polynucleotide
  source 1..21: mol_type = other DNA
ctgagttcgactgatggggtt

SEQ ID NO: 8093 - protein, 7 aa, synthetic construct
  REGION 1..7: note = n-mer motif
VTQNLSE

SEQ ID NO: 8094 - DNA, 21 bp, synthetic construct
  misc_feature 1..21: note = n-mer motif encoding polynucleotide
  source 1..21: mol_type = other DNA
gtgacgcagaatttgagtgag

SEQ ID NO: 8095 - protein, 7 aa, synthetic construct
  REGION 1..7: note = n-mer motif
PARYRLW

SEQ ID NO: 8096 - DNA, 21 bp, synthetic construct
  misc_feature 1..21: note = n-mer motif encoding polynucleotide
  source 1..21: mol_type = other DNA
ccggcgcggtatcggctttgg

SEQ ID NO: 8097 - protein, 7 aa, synthetic construct
  REGION 1..7: note = n-mer motif
GGDALNQ

SEQ ID NO: 8098 - DNA, 21 bp, synthetic construct
  misc_feature 1..21: note = n-mer motif encoding polynucleotide
  source 1..21: mol_type = other DNA
gggggggacgcccttaaccaa

SEQ ID NO: 8099 - protein, 7 aa, synthetic construct
  REGION 1..7: note = n-mer motif
VMASPGP

SEQ ID NO: 8100 - DNA, 21 bp, synthetic construct
  misc_feature 1..21: note = n-mer motif encoding polynucleotide
  source 1..21: mol_type = other DNA
gttatggcttcgcctggtcct

SEQ ID NO: 8101 - protein, 7 aa, synthetic construct
  REGION 1..7: note = n-mer motif
PGDRDQY

SEQ ID NO: 8102 - DNA, 21 bp, synthetic construct
  misc_feature 1..21: note = n-mer motif encoding polynucleotide
  source 1..21: mol_type = other DNA
ccaggcgaccgagaccaatac

SEQ ID NO: 8103 - protein, 7 aa, synthetic construct
  REGION 1..7: note = n-mer motif
LGSLVVH

SEQ ID NO: 8104 - DNA, 21 bp, synthetic construct
  misc_feature 1..21: note = n-mer motif encoding polynucleotide
  source 1..21: mol_type = other DNA
ctgggaagcttagtcgttcac

SEQ ID NO: 8105 - protein, 7 aa, synthetic construct
  REGION 1..7: note = n-mer motif
LEVGALR

SEQ ID NO: 8106 - DNA, 21 bp, synthetic construct
  misc_feature 1..21: note = n-mer motif encoding polynucleotide
  source 1..21: mol_type = other DNA
ctggaagtaggcgcacttcgt

SEQ ID NO: 8107 - protein, 7 aa, synthetic construct
  REGION 1..7: note = n-mer motif
VSPSVLQ

SEQ ID NO: 8108 - DNA, 21 bp, synthetic construct
  misc_feature 1..21: note = n-mer motif encoding polynucleotide
  source 1..21: mol_type = other DNA
gttagtccttcggtgcttcag

SEQ ID NO: 8109 - protein, 7 aa, synthetic construct
  REGION 1..7: note = n-mer motif
GISGEVS

SEQ ID NO: 8110 - DNA, 21 bp, synthetic construct
  misc_feature 1..21: note = n-mer motif encoding polynucleotide
  source 1..21: mol_type = other DNA
ggtatttcgggggaggtgagt

SEQ ID NO: 8111 - protein, 7 aa, synthetic construct
  REGION 1..7: note = n-mer motif
RGAEVLL

SEQ ID NO: 8112 - DNA, 21 bp, synthetic construct
  misc_feature 1..21: note = n-mer motif encoding polynucleotide
  source 1..21: mol_type = other DNA
cggggtgcggaggtgctgctg

SEQ ID NO: 8113 - protein, 7 aa, synthetic construct
  REGION 1..7: note = n-mer motif
GVAGTNS

SEQ ID NO: 8114 - DNA, 21 bp, synthetic construct
  misc_feature 1..21: note = n-mer motif encoding polynucleotide
  source 1..21: mol_type = other DNA
ggagttgcgggaacaaactcc

SEQ ID NO: 8115 - protein, 7 aa, synthetic construct
  REGION 1..7: note = n-mer motif
LNGGIGV

SEQ ID NO: 8116 - DNA, 21 bp, synthetic construct
  misc_feature 1..21: note = n-mer motif encoding polynucleotide
  source 1..21: mol_type = other DNA
cttaatgggggtattggggtt

SEQ ID NO: 8117 - protein, 7 aa, synthetic construct
  REGION 1..7: note = n-mer motif
TIAAHVP

SEQ ID NO: 8118 - DNA, 21 bp, synthetic construct
  misc_feature 1..21: note = n-mer motif encoding polynucleotide
  source 1..21: mol_type = other DNA
accatagcagcccacgtaccc

SEQ ID NO: 8119 - protein, 7 aa, synthetic construct
  REGION 1..7: note = n-mer motif
LNGISFV

SEQ ID NO: 8120 - DNA, 21 bp, synthetic construct
  misc_feature 1..21: note = n-mer motif encoding polynucleotide
  source 1..21: mol_type = other DNA
ttgaatgggatttcgtttgtg

SEQ ID NO: 8121 - protein, 7 aa, synthetic construct
  REGION 1..7: note = n-mer motif
MGVGGGS

SEQ ID NO: 8122 - DNA, 21 bp, synthetic construct
  misc_feature 1..21: note = n-mer motif encoding polynucleotide
  source 1..21: mol_type = other DNA
atgggggtcggtggtggatcc

SEQ ID NO: 8123 - protein, 7 aa, synthetic construct
  REGION 1..7: note = n-mer motif
PLKGGGE

SEQ ID NO: 8124 - DNA, 21 bp, synthetic construct
  misc_feature 1..21: note = n-mer motif encoding polynucleotide
  source 1..21: mol_type = other DNA
ccgttgaaaggcgggggtgaa

SEQ ID NO: 8125 - protein, 7 aa, synthetic construct
  REGION 1..7: note = n-mer motif
RVAQALT

SEQ ID NO: 8126 - DNA, 21 bp, synthetic construct
  misc_feature 1..21: note = n-mer motif encoding polynucleotide
  source 1..21: mol_type = other DNA
agggtggcgcaggctctgacg

SEQ ID NO: 8127 - protein, 7 aa, synthetic construct
  REGION 1..7: note = n-mer motif
EASSRLL

SEQ ID NO: 8128 - DNA, 21 bp, synthetic construct
  misc_feature 1..21: note = n-mer motif encoding polynucleotide
  source 1..21: mol_type = other DNA
gaagcttcgtcgcgacttctc

SEQ ID NO: 8129 - protein, 7 aa, synthetic construct
  REGION 1..7: note = n-mer motif
SQAEGSV

SEQ ID NO: 8130 - DNA, 21 bp, synthetic construct
  misc_feature 1..21: note = n-mer motif encoding polynucleotide
  source 1..21: mol_type = other DNA
tcccaagcggaaggcagcgtg

SEQ ID NO: 8131 - protein, 7 aa, synthetic construct
  REGION 1..7: note = n-mer motif
NSGPQLS

SEQ ID NO: 8132 - DNA, 21 bp, synthetic construct
  misc_feature 1..21: note = n-mer motif encoding polynucleotide
  source 1..21: mol_type = other DNA
aactcgggcccacaactttcg

SEQ ID NO: 8133 - protein, 7 aa, synthetic construct
  REGION 1..7: note = n-mer motif
VQSADPR

SEQ ID NO: 8134 - DNA, 21 bp, synthetic construct
  misc_feature 1..21: note = n-mer motif encoding polynucleotide
  source 1..21: mol_type = other DNA
gtccaatccgcggaccctcgc

SEQ ID NO: 8135 - protein, 7 aa, synthetic construct
  REGION 1..7: note = n-mer motif
VSDSSIN

SEQ ID NO: 8136 - DNA, 21 bp, synthetic construct
  misc_feature 1..21: note = n-mer motif encoding polynucleotide
  source 1..21: mol_type = other DNA
gtgtcggattcgtctattaat

SEQ ID NO: 8137 - protein, 7 aa, synthetic construct
  REGION 1..7: note = n-mer motif
TVKEYEL

SEQ ID NO: 8138 - DNA, 21 bp, synthetic construct
  misc_feature 1..21: note = n-mer motif encoding polynucleotide
  source 1..21: mol_type = other DNA
accgttaaagaatacgaactc

SEQ ID NO: 8139 - protein, 7 aa, synthetic construct
  REGION 1..7: note = n-mer motif
MENAPGR

SEQ ID NO: 8140 - DNA, 21 bp, synthetic construct
  misc_feature 1..21: note = n-mer motif encoding polynucleotide
  source 1..21: mol_type = other DNA
atggagaatgctcctgggagg

SEQ ID NO: 8141 - protein, 7 aa, synthetic construct
  REGION 1..7: note = n-mer motif
GNGDMFA

SEQ ID NO: 8142 - DNA, 21 bp, synthetic construct
  misc_feature 1..21: note = n-mer motif encoding polynucleotide
  source 1..21: mol_type = other DNA
gggaatggggatatgtttgct

SEQ ID NO: 8143 - protein, 7 aa, synthetic construct
  REGION 1..7: note = n-mer motif
HTSGTSS

SEQ ID NO: 8144 - DNA, 21 bp, synthetic construct
  misc_feature 1..21: note = n-mer motif encoding polynucleotide
  source 1..21: mol_type = other DNA
catacgagtgggacgtcgtcg

SEQ ID NO: 8145 - protein, 7 aa, synthetic construct
  REGION 1..7: note = n-mer motif
VIASNEP

SEQ ID NO: 8146 - DNA, 21 bp, synthetic construct
  misc_feature 1..21: note = n-mer motif encoding polynucleotide
  source 1..21: mol_type = other DNA
gttatagcctccaacgaaccg

SEQ ID NO: 8147 - protein, 7 aa, synthetic construct
  REGION 1..7: note = n-mer motif
GINEHVA

SEQ ID NO: 8148 - DNA, 21 bp, synthetic construct
  misc_feature 1..21: note = n-mer motif encoding polynucleotide
  source 1..21: mol_type = other DNA
gggatcaacgaacacgtagcc

SEQ ID NO: 8149 - protein, 7 aa, synthetic construct
  REGION 1..7: note = n-mer motif
HNSHVLT

SEQ ID NO: 8150 - DNA, 21 bp, synthetic construct
  misc_feature 1..21: note = n-mer motif encoding polynucleotide
  source 1..21: mol_type = other DNA
cacaactcccacgtattaacc

SEQ ID NO: 8151 - protein, 7 aa, synthetic construct
  REGION 1..7: note = n-mer motif
QANMLTV

SEQ ID NO: 8152 - DNA, 21 bp, synthetic construct
  misc_feature 1..21: note = n-mer motif encoding polynucleotide
  source 1..21: mol_type = other DNA
caggctaatatgttgactgtt

SEQ ID NO: 8153 - protein, 7 aa, synthetic construct
  REGION 1..7: note = n-mer motif
VFTGTDP

SEQ ID NO: 8154 - DNA, 21 bp, synthetic construct
  misc_feature 1..21: note = n-mer motif encoding polynucleotide
  source 1..21: mol_type = other DNA
gtgttcaccggcacagaccct

SEQ ID NO: 8155 - protein, 7 aa, synthetic construct
  REGION 1..7: note = n-mer motif
ASDAVLR

SEQ ID NO: 8156 - DNA, 21 bp, synthetic construct
  misc_feature 1..21: note = n-mer motif encoding polynucleotide
  source 1..21: mol_type = other DNA
gcatccgacgccgtcctaagg

SEQ ID NO: 8157 - protein, 7 aa, synthetic construct
  REGION 1..7: note = n-mer motif
ASDAVLR

SEQ ID NO: 8158 - DNA, 21 bp, synthetic construct
  misc_feature 1..21: note = n-mer motif encoding polynucleotide
  source 1..21: mol_type = other DNA
gctagtgatgcggtgttgcgt

SEQ ID NO: 8159 - protein, 7 aa, synthetic construct
  REGION 1..7: note = n-mer motif
RDLTNDV

SEQ ID NO: 8160 - DNA, 21 bp, synthetic construct
  misc_feature 1..21: note = n-mer motif encoding polynucleotide
  source 1..21: mol_type = other DNA
cgcgacttaactaacgacgtt

SEQ ID NO: 8161 - protein, 7 aa, synthetic construct
  REGION 1..7: note = n-mer motif
RVHSAQL

SEQ ID NO: 8162 - DNA, 21 bp, synthetic construct
  misc_feature 1..21: note = n-mer motif encoding polynucleotide
  source 1..21: mol_type = other DNA
agggtgcattcggcgcagctt

SEQ ID NO: 8163 - protein, 7 aa, synthetic construct
  REGION 1..7: note = n-mer motif
SGNAWDE

SEQ ID NO: 8164 - DNA, 21 bp, synthetic construct
  misc_feature 1..21: note = n-mer motif encoding polynucleotide
  source 1..21: mol_type = other DNA
agtgggaatgcttgggatgag

SEQ ID NO: 8165 - protein, 7 aa, synthetic construct
  REGION 1..7: note = n-mer motif
GHQALNA

SEQ ID NO: 8166 - DNA, 21 bp, synthetic construct
  misc_feature 1..21: note = n-mer motif encoding polynucleotide
  source 1..21: mol_type = other DNA
ggccaccaagcattaaacgcc

SEQ ID NO: 8167 - protein, 7 aa, synthetic construct
  REGION 1..7: note = n-mer motif
IADMGGN

SEQ ID NO: 8168 - DNA, 21 bp, synthetic construct
  misc_feature 1..21: note = n-mer motif encoding polynucleotide
  source 1..21: mol_type = other DNA
attgctgatatgggtggtaat

SEQ ID NO: 8169 - protein, 7 aa, synthetic construct
  REGION 1..7: note = n-mer motif
SMDSTSR

SEQ ID NO: 8170 - DNA, 21 bp, synthetic construct
  misc_feature 1..21: note = n-mer motif encoding polynucleotide
  source 1..21: mol_type = other DNA
tctatggattcgacgtctagg

SEQ ID NO: 8171 - protein, 7 aa, synthetic construct
  REGION 1..7: note = n-mer motif
GVSLPMS

SEQ ID NO: 8172 - DNA, 21 bp, synthetic construct
  misc_feature 1..21: note = n-mer motif encoding polynucleotide
  source 1..21: mol_type = other DNA
ggcgtatcactacccatgagc

SEQ ID NO: 8173 - protein, 7 aa, synthetic construct
  REGION 1..7: note = n-mer motif
AALAGSR

SEQ ID NO: 8174 - DNA, 21 bp, synthetic construct
  misc_feature 1..21: note = n-mer motif encoding polynucleotide
  source 1..21: mol_type = other DNA
gcggctctggcggggtctagg

SEQ ID NO: 8175 - protein, 7 aa, synthetic construct
  REGION 1..7: note = n-mer motif
ILGVYSD

SEQ ID NO: 8176 - DNA, 21 bp, synthetic construct
  misc_feature 1..21: note = n-mer motif encoding polynucleotide
  source 1..21: mol_type = other DNA
atactgggcgtttactccgac

SEQ ID NO: 8177 - protein, 7 aa, synthetic construct
  REGION 1..7: note = n-mer motif
APRDPGV

SEQ ID NO: 8178 - DNA, 21 bp, synthetic construct
  misc_feature 1..21: note = n-mer motif encoding polynucleotide
  source 1..21: mol_type = other DNA
gcgccgcgtgatcctggtgtt

SEQ ID NO: 8179 - protein, 7 aa, synthetic construct
  REGION 1..7: note = n-mer motif
NRHETLS

SEQ ID NO: 8180 - DNA, 21 bp, synthetic construct
  misc_feature 1..21: note = n-mer motif encoding polynucleotide
  source 1..21: mol_type = other DNA
aaccgccacgaaacactatca

SEQ ID NO: 8181 - protein, 7 aa, synthetic construct
  REGION 1..7: note = n-mer motif
LGDGTTR

SEQ ID NO: 8182 - DNA, 21 bp, synthetic construct
  misc_feature 1..21: note = n-mer motif encoding polynucleotide
  source 1..21: mol_type = other DNA
ctgggggatggtacgactcgg

SEQ ID NO: 8183 - protein, 7 aa, synthetic construct
  REGION 1..7: note = n-mer motif
RNHDQTH

SEQ ID NO: 8184 - DNA, 21 bp, synthetic construct
  misc_feature 1..21: note = n-mer motif encoding polynucleotide
  source 1..21: mol_type = other DNA
agaaaccacgaccaaacacac

SEQ ID NO: 8185 - protein, 7 aa, synthetic construct
  REGION 1..7: note = n-mer motif
MTDSGTV

SEQ ID NO: 8186 - DNA, 21 bp, synthetic construct
  misc_feature 1..21: note = n-mer motif encoding polynucleotide
  source 1..21: mol_type = other DNA
atgactgatagtgggactgtg

SEQ ID NO: 8187 - protein, 7 aa, synthetic construct
  REGION 1..7: note = n-mer motif
NHHGDRL

SEQ ID NO: 8188 - DNA, 21 bp, synthetic construct
  misc_feature 1..21: note = n-mer motif encoding polynucleotide
  source 1..21: mol_type = other DNA
aaccaccacggagacaggctg

SEQ ID NO: 8189 - protein, 7 aa, synthetic construct
  REGION 1..7: note = n-mer motif
LANTVVT

SEQ ID NO: 8190 - DNA, 21 bp, synthetic construct
  misc_feature 1..21: note = n-mer motif encoding polynucleotide
  source 1..21: mol_type = other DNA
cttgctaatacggttgtgacg

SEQ ID NO: 8191 - protein, 7 aa, synthetic construct
  REGION 1..7: note = n-mer motif
QFHENIR

SEQ ID NO: 8192 - DNA, 21 bp, synthetic construct
  misc_feature 1..21: note = n-mer motif encoding polynucleotide
  source 1..21: mol_type = other DNA
cagtttcatgagaatattcgt

SEQ ID NO: 8193 - protein, 7 aa, synthetic construct
  REGION 1..7: note = n-mer motif
NFGRDTL

SEQ ID NO: 8194 - DNA, 21 bp, synthetic construct
  misc_feature 1..21: note = n-mer motif encoding polynucleotide
  source 1..21: mol_type = other DNA
aattttggtcgtgatactctg

SEQ ID NO: 8195 - protein, 7 aa, synthetic construct
  REGION 1..7: note = n-mer motif
SGSNTGP

SEQ ID NO: 8196 - DNA, 21 bp, synthetic construct
  misc_feature 1..21: note = n-mer motif encoding polynucleotide
  source 1..21: mol_type = other DNA
agcggctccaacactggcccg

SEQ ID NO: 8197 - protein, 7 aa, synthetic construct
  REGION 1..7: note = n-mer motif
EPAMGMR

SEQ ID NO: 8198 - DNA, 21 bp, synthetic construct
  misc_feature 1..21: note = n-mer motif encoding polynucleotide
  source 1..21: mol_type = other DNA
gagccggcgatggggatgagg

SEQ ID NO: 8199 - protein, 7 aa, synthetic construct
  REGION 1..7: note = n-mer motif
ENAGTDV

SEQ ID NO: 8200 - DNA, 21 bp, synthetic construct
  misc_feature 1..21: note = n-mer motif encoding polynucleotide
  source 1..21: mol_type = other DNA
gaaaacgccggaactgacgtc

SEQ ID NO: 8201 - protein, 7 aa, synthetic construct
  REGION 1..7: note = n-mer motif
IIISSAN

SEQ ID NO: 8202 - DNA, 21 bp, synthetic construct
  misc_feature 1..21: note = n-mer motif encoding polynucleotide
  source 1..21: mol_type = other DNA
ataatcatatcctcggccaac

SEQ ID NO: 8203 - protein, 7 aa, synthetic construct
  REGION 1..7: note = n-mer motif
NHVGDRL

SEQ ID NO: 8204 - DNA, 21 bp, synthetic construct
  misc_feature 1..21: note = n-mer motif encoding polynucleotide
  source 1..21: mol_type = other DNA
aatcatgttggtgatcgtttg

SEQ ID NO: 8205 - protein, 7 aa, synthetic construct
  REGION 1..7: note = n-mer motif
SGGLMTG

SEQ ID NO: 8206 - DNA, 21 bp, synthetic construct
  misc_feature 1..21: note = n-mer motif encoding polynucleotide
  source 1..21: mol_type = other DNA
agtggtggtcttatgactggt

SEQ ID NO: 8207 - protein, 7 aa, synthetic construct
  REGION 1..7: note = n-mer motif
GRGTNDH

SEQ ID NO: 8208 - DNA, 21 bp, synthetic construct
  misc_feature 1..21: note = n-mer motif encoding polynucleotide
  source 1..21: mol_type = other DNA
ggtcggggtacgaatgatcat

SEQ ID NO: 8209 - protein, 7 aa, synthetic construct
  REGION 1..7: note = n-mer motif
LANMLQV

SEQ ID NO: 8210 - DNA, 21 bp, synthetic construct
  misc_feature 1..21: note = n-mer motif encoding polynucleotide
  source 1..21: mol_type = other DNA
ttggcaaacatgcttcaagtg

SEQ ID NO: 8211 - protein, 7 aa, synthetic construct
  REGION 1..7: note = n-mer motif
TNTDSSL

SEQ ID NO: 8212 - DNA, 21 bp, synthetic construct
  misc_feature 1..21: note = n-mer motif encoding polynucleotide
  source 1..21: mol_type = other DNA
acgaatacggattctagtctg

SEQ ID NO: 8213 - protein, 7 aa, synthetic construct
  REGION 1..7: note = n-mer motif
GSGPGVA

SEQ ID NO: 8214 - DNA, 21 bp, synthetic construct
  misc_feature 1..21: note = n-mer motif encoding polynucleotide
  source 1..21: mol_type = other DNA
ggttctgggccgggggtggct

SEQ ID NO: 8215 - protein, 7 aa, synthetic construct
  REGION 1..7: note = n-mer motif
ADVLIRG

SEQ ID NO: 8216 - DNA, 21 bp, synthetic construct
  misc_feature 1..21: note = n-mer motif encoding polynucleotide
  source 1..21: mol_type = other DNA
gcggacgtgctcatacgcggt

SEQ ID NO: 8217 - protein, 7 aa, synthetic construct
  REGION 1..7: note = n-mer motif
TLQQLQL

SEQ ID NO: 8218 - DNA, 21 bp, synthetic construct
  misc_feature 1..21: note = n-mer motif encoding polynucleotide
  source 1..21: mol_type = other DNA
actctccaacaactgcaattg

SEQ ID NO: 8219 - protein, 7 aa, synthetic construct
  REGION 1..7: note = n-mer motif
TMANSER

SEQ ID NO: 8220 - DNA, 21 bp, synthetic construct
  misc_feature 1..21: note = n-mer motif encoding polynucleotide
  source 1..21: mol_type = other DNA
acgatggcaaactcggaacgc

SEQ ID NO: 8221 - protein, 7 aa, synthetic construct
  REGION 1..7: note = n-mer motif
WDDQTSG

SEQ ID NO: 8222 - DNA, 21 bp, synthetic construct
  misc_feature 1..21: note = n-mer motif encoding polynucleotide
  source 1..21: mol_type = other DNA
tgggatgatcagacttcgggg

SEQ ID NO: 8223 - protein, 7 aa, synthetic construct
  REGION 1..7: note = n-mer motif
GTGSTNV

SEQ ID NO: 8224 - DNA, 21 bp, synthetic construct
  misc_feature 1..21: note = n-mer motif encoding polynucleotide
  source 1..21: mol_type = other DNA
ggaactggatcgacaaacgtt

SEQ ID NO: 8225 - protein, 7 aa, synthetic construct
  REGION 1..7: note = n-mer motif
GPSGAGI

SEQ ID NO: 8226 - DNA, 21 bp, synthetic construct
  misc_feature 1..21: note = n-mer motif encoding polynucleotide
  source 1..21: mol_type = other DNA
gggccatcaggggcaggcatc

SEQ ID NO: 8227 - protein, 7 aa, synthetic construct
  REGION 1..7: note = n-mer motif
NAAVIYD

SEQ ID NO: 8228 - DNA, 21 bp, synthetic construct
  misc_feature 1..21: note = n-mer motif encoding polynucleotide
  source 1..21: mol_type = other DNA
aacgctgcagtgatatacgac

SEQ ID NO: 8229 - protein, 7 aa, synthetic construct
  REGION 1..7: note = n-mer motif
SNLGETV

SEQ ID NO: 8230 - DNA, 21 bp, synthetic construct
  misc_feature 1..21: note = n-mer motif encoding polynucleotide
  source 1..21: mol_type = other DNA
tcgaatttgggggagacggtt

SEQ ID NO: 8231 - protein, 7 aa, synthetic construct
  REGION 1..7: note = n-mer motif
EPSLGSR

SEQ ID NO: 8232 - DNA, 21 bp, synthetic construct
  misc_feature 1..21: note = n-mer motif encoding polynucleotide
  source 1..21: mol_type = other DNA
gagccgtctctgggttctcgg

SEQ ID NO: 8233 - protein, 7 aa, synthetic construct
  REGION 1..7: note = n-mer motif
IGASVKL

SEQ ID NO: 8234 - DNA, 21 bp, synthetic construct
  misc_feature 1..21: note = n-mer motif encoding polynucleotide
  source 1..21: mol_type = other DNA
atcggtgcatcggtaaaactg

SEQ ID NO: 8235 - protein, 7 aa, synthetic construct
  REGION 1..7: note = n-mer motif
SRGVISS

SEQ ID NO: 8236 - DNA, 21 bp, synthetic construct
  misc_feature 1..21: note = n-mer motif encoding polynucleotide
  source 1..21: mol_type = other DNA
agccgaggcgtaatctcgtca

SEQ ID NO: 8237 - protein, 7 aa, synthetic construct
  REGION 1..7: note = n-mer motif
RVMGEEV

SEQ ID NO: 8238 - DNA, 21 bp, synthetic construct
  misc_feature 1..21: note = n-mer motif encoding polynucleotide
  source 1..21: mol_type = other DNA
cgtgtgatgggggaggaggtt

SEQ ID NO: 8239 - protein, 7 aa, synthetic construct
  REGION 1..7: note = n-mer motif
YSTERSV

SEQ ID NO: 8240 - DNA, 21 bp, synthetic construct
  misc_feature 1..21: note = n-mer motif encoding polynucleotide
  source 1..21: mol_type = other DNA
tattcgactgagaggtctgtt

SEQ ID NO: 8241 - protein, 7 aa, synthetic construct
  REGION 1..7: note = n-mer motif
AGGGTPR

SEQ ID NO: 8242 - DNA, 21 bp, synthetic construct
  misc_feature 1..21: note = n-mer motif encoding polynucleotide
  source 1..21: mol_type = other DNA
gcggggggtgggactccgagg

SEQ ID NO: 8243 - protein, 7 aa, synthetic construct
  REGION 1..7: note = n-mer motif
VLPSPGP

SEQ ID NO: 8244 - DNA, 21 bp, synthetic construct
  misc_feature 1..21: note = n-mer motif encoding polynucleotide
  source 1..21: mol_type = other DNA
gttctgccttcgcctggtcct

SEQ ID NO: 8245 - protein, 7 aa, synthetic construct
  REGION 1..7: note = n-mer motif
TSVLPQT

SEQ ID NO: 8246 - DNA, 21 bp, synthetic construct
  misc_feature 1..21: note = n-mer motif encoding polynucleotide
  source 1..21: mol_type = other DNA
acgtctgtgcttcctcagact

SEQ ID NO: 8247 - protein, 7 aa, synthetic construct
  REGION 1..7: note = n-mer motif
ILASPGP

SEQ ID NO: 8248 - DNA, 21 bp, synthetic construct
  misc_feature 1..21: note = n-mer motif encoding polynucleotide
  source 1..21: mol_type = other DNA
atacttgcgtcacccggaccg

SEQ ID NO: 8249 - protein, 7 aa, synthetic construct
  REGION 1..7: note = n-mer motif
GEIDIAF

SEQ ID NO: 8250 - DNA, 21 bp, synthetic construct
  misc_feature 1..21: note = n-mer motif encoding polynucleotide
  source 1..21: mol_type = other DNA
ggagaaatcgacatagccttc

SEQ ID NO: 8251 - protein, 7 aa, synthetic construct
  REGION 1..7: note = n-mer motif
GWADSVP

SEQ ID NO: 8252 - DNA, 21 bp, synthetic construct
  misc_feature 1..21: note = n-mer motif encoding polynucleotide
  source 1..21: mol_type = other DNA
ggttgggctgattcggttccg

SEQ ID NO: 8253 - protein, 7 aa, synthetic construct
  REGION 1..7: note = n-mer motif
GVAATNT

SEQ ID NO: 8254 - DNA, 21 bp, synthetic construct
  misc_feature 1..21: note = n-mer motif encoding polynucleotide
  source 1..21: mol_type = other DNA
ggagttgcagccacaaacacg

SEQ ID NO: 8255 - protein, 7 aa, synthetic construct
  REGION 1..7: note = n-mer motif
LVGNPST

SEQ ID NO: 8256 - DNA, 21 bp, synthetic construct
  misc_feature 1..21: note = n-mer motif encoding polynucleotide
  source 1..21: mol_type = other DNA
ctcgtgggcaacccgagtacg

SEQ ID NO: 8257 - protein, 7 aa, synthetic construct
  REGION 1..7: note = n-mer motif
YGVTLST

SEQ ID NO: 8258 - DNA, 21 bp, synthetic construct
  misc_feature 1..21: note = n-mer motif encoding polynucleotide
  source 1..21: mol_type = other DNA
tacggcgtaaccctctctacc

SEQ ID NO: 8259 - protein, 7 aa, synthetic construct
  REGION 1..7: note = n-mer motif
ASMGTVA

SEQ ID NO: 8260 - DNA, 21 bp, synthetic construct
  misc_feature 1..21: note = n-mer motif encoding polynucleotide
  source 1..21: mol_type = other DNA
gcgtccatgggaaccgtagcc

SEQ ID NO: 8261 - protein, 7 aa, synthetic construct
  REGION 1..7: note = n-mer motif
WSNSEQH

SEQ ID NO: 8262 - DNA, 21 bp, synthetic construct
  misc_feature 1..21: note = n-mer motif encoding polynucleotide
  source 1..21: mol_type = other DNA
tggtcgaattcggagcagcat

SEQ ID NO: 8263 - protein, 7 aa, synthetic construct
  REGION 1..7: note = n-mer motif
REVSPLM

SEQ ID NO: 8264 - DNA, 21 bp, synthetic construct
  misc_feature 1..21: note = n-mer motif encoding polynucleotide
  source 1..21: mol_type = other DNA
cgagaagtaagccccctgatg

SEQ ID NO: 8265 - protein, 7 aa, synthetic construct
  REGION 1..7: note = n-mer motif
QAESAAR

SEQ ID NO: 8266 - DNA, 21 bp, synthetic construct
  misc_feature 1..21: note = n-mer motif encoding polynucleotide
  source 1..21: mol_type = other DNA
caagcggaatcagcggctaga

SEQ ID NO: 8267 - protein, 7 aa, synthetic construct
  REGION 1..7: note = n-mer motif
ALQSAQV

SEQ ID NO: 8268 - DNA, 21 bp, synthetic construct
  misc_feature 1..21: note = n-mer motif encoding polynucleotide
  source 1..21: mol_type = other DNA
gcactacaatctgcacaagtt

SEQ ID NO: 8269 - protein, 7 aa, synthetic construct
  REGION 1..7: note = n-mer motif
PNDRLTV

SEQ ID NO: 8270 - DNA, 21 bp, synthetic construct
  misc_feature 1..21: note = n-mer motif encoding polynucleotide
  source 1..21: mol_type = other DNA
ccaaacgaccggttgacggtt

SEQ ID NO: 8271 - protein, 7 aa, synthetic construct
  REGION 1..7: note = n-mer motif
LIVTENQ

SEQ ID NO: 8272 - DNA, 21 bp, synthetic construct
  misc_feature 1..21: note = n-mer motif encoding polynucleotide
  source 1..21: mol_type = other DNA
ttgattgtgacggagaatcag

SEQ ID NO: 8273 - protein, 7 aa, synthetic construct
  REGION 1..7: note = n-mer motif
GLVHMPS

SEQ ID NO: 8274 - DNA, 21 bp, synthetic construct
  misc_feature 1..21: note = n-mer motif encoding polynucleotide
  source 1..21: mol_type = other DNA
ggcttagttcacatgccctca

SEQ ID NO: 8275 - protein, 7 aa, synthetic construct
  REGION 1..7: note = n-mer motif
MADGASM

SEQ ID NO: 8276 - DNA, 21 bp, synthetic construct
  misc_feature 1..21: note = n-mer motif encoding polynucleotide
  source 1..21: mol_type = other DNA
atggcggatggtgcgtctatg

SEQ ID NO: 8277 - protein, 7 aa, synthetic construct
  REGION 1..7: note = n-mer motif
RAVENMG

SEQ ID NO: 8278 - DNA, 21 bp, synthetic construct
  misc_feature 1..21: note = n-mer motif encoding polynucleotide
  source 1..21: mol_type = other DNA
cgcgcagtagaaaacatgggc

SEQ ID NO: 8279 - protein, 7 aa, synthetic construct
  REGION 1..7: note = n-mer motif
LNGVTIT

SEQ ID NO: 8280 - DNA, 21 bp, synthetic construct
  misc_feature 1..21: note = n-mer motif encoding polynucleotide
  source 1..21: mol_type = other DNA
ctcaacggcgtcaccatcacc

SEQ ID NO: 8281 - protein, 7 aa, synthetic construct
  REGION 1..7: note = n-mer motif
RYNVETA

SEQ ID NO: 8282 - DNA, 21 bp, synthetic construct
  misc_feature 1..21: note = n-mer motif encoding polynucleotide
  source 1..21: mol_type = other DNA
cggtataatgttgagactgcg

SEQ ID NO: 8283 - protein, 7 aa, synthetic construct
  REGION 1..7: note = n-mer motif
SLLHDGA

SEQ ID NO: 8284 - DNA, 21 bp, synthetic construct
  misc_feature 1..21: note = n-mer motif encoding polynucleotide
  source 1..21: mol_type = other DNA
agtttgttgcatgatggggcg

SEQ ID NO: 8285 - protein, 7 aa, synthetic construct
  REGION 1..7: note = n-mer motif
TRIGLSD

SEQ ID NO: 8286 - DNA, 21 bp, synthetic construct
  misc_feature 1..21: note = n-mer motif encoding polynucleotide
  source 1..21: mol_type = other DNA
acacgaataggactcagtgac

SEQ ID NO: 8287 - protein, 7 aa, synthetic construct
  REGION 1..7: note = n-mer motif
NAHALMV

SEQ ID NO: 8288 - DNA, 21 bp, synthetic construct
  misc_feature 1..21: note = n-mer motif encoding polynucleotide
  source 1..21: mol_type = other DNA
aacgcccacgcactcatggtc

SEQ ID NO: 8289 - protein, 7 aa, synthetic construct
  REGION 1..7: note = n-mer motif
VEVQAGK

SEQ ID NO: 8290 - DNA, 21 bp, synthetic construct
  misc_feature 1..21: note = n-mer motif encoding polynucleotide
  source 1..21: mol_type = other DNA
gtggaggttcaggctgggaag

SEQ ID NO: 8291 - protein, 7 aa, synthetic construct
  REGION 1..7: note = n-mer motif
RGGVLSE

SEQ ID NO: 8292 - DNA, 21 bp, synthetic construct
  misc_feature 1..21: note = n-mer motif encoding polynucleotide
  source 1..21: mol_type = other DNA
cgaggtggggtactcagtgaa

SEQ ID NO: 8293 - protein, 7 aa, synthetic construct
  REGION 1..7: note = n-mer motif
KNQDTKM

SEQ ID NO: 8294 - DNA, 21 bp, synthetic construct
  misc_feature 1..21: note = n-mer motif encoding polynucleotide
  source 1..21: mol_type = other DNA
aagaatcaggatacgaagatg

SEQ ID NO: 8295 - protein, 7 aa, synthetic construct
  REGION 1..7: note = n-mer motif
QLRPLQT

SEQ ID NO: 8296 - DNA, 21 bp, synthetic construct
  misc_feature 1..21: note = n-mer motif encoding polynucleotide
  source 1..21: mol_type = other DNA
caactgcgtcctttgcaaacg

SEQ ID NO: 8297 - protein, 7 aa, synthetic construct
  REGION 1..7: note = n-mer motif
LLENARV

SEQ ID NO: 8298 - DNA, 21 bp, synthetic construct
  misc_feature 1..21: note = n-mer motif encoding polynucleotide
  source 1..21: mol_type = other DNA
ctgctggagaatgcgagggtg

SEQ ID NO: 8299 - protein, 7 aa, synthetic construct
  REGION 1..7: note = n-mer motif
LFGPSAY

SEQ ID NO: 8300 - DNA, 21 bp, synthetic construct
  misc_feature 1..21: note = n-mer motif encoding polynucleotide
  source 1..21: mol_type = other DNA
ttattcggaccttccgcctac

SEQ ID NO: 8301 - protein, 7 aa, synthetic construct
  REGION 1..7: note = n-mer motif
RIDAELL

SEQ ID NO: 8302 - DNA, 21 bp, synthetic construct
  misc_feature 1..21: note = n-mer motif encoding polynucleotide
  source 1..21: mol_type = other DNA
cgtattgatgctgagttgttg

SEQ ID NO: 8303 - protein, 7 aa, synthetic construct
  REGION 1..7: note = n-mer motif
VVSGLLH

SEQ ID NO: 8304 - DNA, 21 bp, synthetic construct
  misc_feature 1..21: note = n-mer motif encoding polynucleotide
  source 1..21: mol_type = other DNA
gttgtctccgggttgctacac

SEQ ID NO: 8305 - protein, 7 aa, synthetic construct
  REGION 1..7: note = n-mer motif
MGGVTSV

SEQ ID NO: 8306 - DNA, 21 bp, synthetic construct
  misc_feature 1..21: note = n-mer motif encoding polynucleotide
  source 1..21: mol_type = other DNA
atggggggggttacttcggtg

SEQ ID NO: 8307 - protein, 7 aa, synthetic construct
  REGION 1..7: note = n-mer motif
TVADPRA

SEQ ID NO: 8308 - DNA, 21 bp, synthetic construct
  misc_feature 1..21: note = n-mer motif encoding polynucleotide
  source 1..21: mol_type = other DNA
actgttgcggatccgcgggcg

SEQ ID NO: 8309 - protein, 7 aa, synthetic construct
  REGION 1..7: note = n-mer motif
TGLQVST

SEQ ID NO: 8310 - DNA, 21 bp, synthetic construct
  misc_feature 1..21: note = n-mer motif encoding polynucleotide
  source 1..21: mol_type = other DNA
actgggctgcaggttagtact

SEQ ID NO: 8311 - protein, 7 aa, synthetic construct
  REGION 1..7: note = n-mer motif
ANEHNIA

SEQ ID NO: 8312 - DNA, 21 bp, synthetic construct
  misc_feature 1..21: note = n-mer motif encoding polynucleotide
  source 1..21: mol_type = other DNA
gctaatgagcataatattgcg

SEQ ID NO: 8313 - protein, 7 aa, synthetic construct
  REGION 1..7: note = n-mer motif
STLASPR

SEQ ID NO: 8314 - DNA, 21 bp, synthetic construct
  misc_feature 1..21: note = n-mer motif encoding polynucleotide
  source 1..21: mol_type = other DNA
tcaaccctagcctcgcctcga

SEQ ID NO: 8315 - protein, 7 aa, synthetic construct
  REGION 1..7: note = n-mer motif
IHFSGDN

SEQ ID NO: 8316 - DNA, 21 bp, synthetic construct
  misc_feature 1..21: note = n-mer motif encoding polynucleotide
  source 1..21: mol_type = other DNA
atccacttcagcggcgacaac

SEQ ID NO: 8317 - protein, 7 aa, synthetic construct
  REGION 1..7: note = n-mer motif
GLVQIVA

SEQ ID NO: 8318 - DNA, 21 bp, synthetic construct
  misc_feature 1..21: note = n-mer motif encoding polynucleotide
  source 1..21: mol_type = other DNA
gggcttgttcagattgttgcg

SEQ ID NO: 8319 - protein, 7 aa, synthetic construct
  REGION 1..7: note = n-mer motif
TAYDTLV

SEQ ID NO: 8320 - DNA, 21 bp, synthetic construct
  misc_feature 1..21: note = n-mer motif encoding polynucleotide
  source 1..21: mol_type = other DNA
acggcgtatgatacgttggtt

SEQ ID NO: 8321 - protein, 7 aa, synthetic construct
  REGION 1..7: note = n-mer motif
AVKEYQS

SEQ ID NO: 8322 - DNA, 21 bp, synthetic construct
  misc_feature 1..21: note = n-mer motif encoding polynucleotide
  source 1..21: mol_type = other DNA
gctgttaaagaataccaatct

SEQ ID NO: 8323 - protein, 7 aa, synthetic construct
  REGION 1..7: note = n-mer motif
ASSHVTV

SEQ ID NO: 8324 - DNA, 21 bp, synthetic construct
  misc_feature 1..21: note = n-mer motif encoding polynucleotide
  source 1..21: mol_type = other DNA
gcttcgagtcatgttactgtg

SEQ ID NO: 8325 - protein, 7 aa, synthetic construct
  REGION 1..7: note = n-mer motif
STLSTFD

SEQ ID NO: 8326 - DNA, 21 bp, synthetic construct
  misc_feature 1..21: note = n-mer motif encoding polynucleotide
  source 1..21: mol_type = other DNA
tcgactttgagtacgtttgat

SEQ ID NO: 8327 - protein, 7 aa, synthetic construct
  REGION 1..7: note = n-mer motif
LDLTSDV

SEQ ID NO: 8328 - DNA, 21 bp, synthetic construct
  misc_feature 1..21: note = n-mer motif encoding polynucleotide
  source 1..21: mol_type = other DNA
cttgatctgacgtctgatgtg

SEQ ID NO: 8329 - protein, 7 aa, synthetic construct
  REGION 1..7: note = n-mer motif
QYNVEST

SEQ ID NO: 8330 - DNA, 21 bp, synthetic construct
  misc_feature 1..21: note = n-mer motif encoding polynucleotide
  source 1..21: mol_type = other DNA
cagtataatgttgagtctacg

SEQ ID NO: 8331 - protein, 7 aa, synthetic construct
  REGION 1..7: note = n-mer motif
SVEPLSL

SEQ ID NO: 8332 - DNA, 21 bp, synthetic construct
  misc_feature 1..21: note = n-mer motif encoding polynucleotide
  source 1..21: mol_type = other DNA
tccgtagaacctctatccctc

SEQ ID NO: 8333 - protein, 7 aa, synthetic construct
  REGION 1..7: note = n-mer motif
PGHGPVR

SEQ ID NO: 8334 - DNA, 21 bp, synthetic construct
  misc_feature 1..21: note = n-mer motif encoding polynucleotide
  source 1..21: mol_type = other DNA
cccgggcacggacctgtacgc

SEQ ID NO: 8335 - protein, 7 aa, synthetic construct
  REGION 1..7: note = n-mer motif
VRQLDSR

SEQ ID NO: 8336 - DNA, 21 bp, synthetic construct
  misc_feature 1..21: note = n-mer motif encoding polynucleotide
  source 1..21: mol_type = other DNA
gtgaggcagctggattcgcgg

SEQ ID NO: 8337 - protein, 7 aa, synthetic construct
  REGION 1..7: note = n-mer motif
MMLNQGS

SEQ ID NO: 8338 - DNA, 21 bp, synthetic construct
  misc_feature 1..21: note = n-mer motif encoding polynucleotide
  source 1..21: mol_type = other DNA
atgatgcttaaccaaggcagc

SEQ ID NO: 8339 - protein, 7 aa, synthetic construct
  REGION 1..7: note = n-mer motif
EPSLSSP

SEQ ID NO: 8340 - DNA, 21 bp, synthetic construct
  misc_feature 1..21: note = n-mer motif encoding polynucleotide
  source 1..21: mol_type = other DNA
gagccgtctctgagttctccg

SEQ ID NO: 8341 - protein, 7 aa, synthetic construct
  REGION 1..7: note = n-mer motif
PGVDTGV

SEQ ID NO: 8342 - DNA, 21 bp, synthetic construct
  misc_feature 1..21: note = n-mer motif encoding polynucleotide
  source 1..21: mol_type = other DNA
cctggtgttgatactggtgtt

SEQ ID NO: 8343 - protein, 7 aa, synthetic construct
  REGION 1..7: note = n-mer motif
SGDVARH

SEQ ID NO: 8344 - DNA, 21 bp, synthetic construct
  misc_feature 1..21: note = n-mer motif encoding polynucleotide
  source 1..21: mol_type = other DNA
tcaggcgacgttgcccgacac

SEQ ID NO: 8345 - protein, 7 aa, synthetic construct
  REGION 1..7: note = n-mer motif
ADYGTSS

SEQ ID NO: 8346 - DNA, 21 bp, synthetic construct
  misc_feature 1..21: note = n-mer motif encoding polynucleotide
  source 1..21: mol_type = other DNA
gcggactacggtaccagctct

SEQ ID NO: 8347 - protein, 7 aa, synthetic construct
  REGION 1..7: note = n-mer motif
VHSQDVS

SEQ ID NO: 8348 - DNA, 21 bp, synthetic construct
  misc_feature 1..21: note = n-mer motif encoding polynucleotide
  source 1..21: mol_type = other DNA
gtgcattcgcaggatgtgtct

SEQ ID NO: 8349 - protein, 7 aa, synthetic construct
  REGION 1..7: note = n-mer motif
VIAGLGV

SEQ ID NO: 8350 - DNA, 21 bp, synthetic construct
  misc_feature 1..21: note = n-mer motif encoding polynucleotide
  source 1..21: mol_type = other DNA
gtgatcgcgggactcggcgtc

SEQ ID NO: 8351 - protein, 7 aa, synthetic construct
  REGION 1..7: note = n-mer motif
VHVDNSN

SEQ ID NO: 8352 - DNA, 21 bp, synthetic construct
  misc_feature 1..21: note = n-mer motif encoding polynucleotide
  source 1..21: mol_type = other DNA
gtgcatgttgataatagtaat

SEQ ID NO: 8353 - protein, 6 aa, synthetic construct
  REGION 1..6: note = n-mer motif
QSGVFC

SEQ ID NO: 8354 - DNA, 21 bp, synthetic construct
  misc_feature 1..21: note = n-mer motif encoding polynucleotide
  source 1..21: mol_type = other DNA
cagtcgggggtgttctgatgc

SEQ ID NO: 8355 - protein, 7 aa, synthetic construct
  REGION 1..7: note = n-mer motif
AQDHGTL

SEQ ID NO: 8356 - DNA, 21 bp, synthetic construct
  misc_feature 1..21: note = n-mer motif encoding polynucleotide
  source 1..21: mol_type = other DNA
gcgcaggatcatgggacgttg

SEQ ID NO: 8357 - protein, 7 aa, synthetic construct
  REGION 1..7: note = n-mer motif
SRLEYIG

SEQ ID NO: 8358 - DNA, 21 bp, synthetic construct
  misc_feature 1..21: note = n-mer motif encoding polynucleotide
  source 1..21: mol_type = other DNA
agccgccttgaatacatcggg

SEQ ID NO: 8359 - protein, 7 aa, synthetic construct
  REGION 1..7: note = n-mer motif
VLLGINT

SEQ ID NO: 8360 - DNA, 21 bp, synthetic construct
  misc_feature 1..21: note = n-mer motif encoding polynucleotide
  source 1..21: mol_type = other DNA
gtcctgctcggaataaacacc

SEQ ID NO: 8361 - protein, 7 aa, synthetic construct
  REGION 1..7: note = n-mer motif
LGIGQGP

SEQ ID NO: 8362 - DNA, 21 bp, synthetic construct
  misc_feature 1..21: note = n-mer motif encoding polynucleotide
  source 1..21: mol_type = other DNA
ttgggtattggtcagggtcct

SEQ ID NO: 8363 - protein, 7 aa, synthetic construct
  REGION 1..7: note = n-mer motif
NVTATLG

SEQ ID NO: 8364 - DNA, 21 bp, synthetic construct
  misc_feature 1..21: note = n-mer motif encoding polynucleotide
  source 1..21: mol_type = other DNA
aacgtcacagcaacgctgggt

SEQ ID NO: 8365 - protein, 7 aa, synthetic construct
  REGION 1..7: note = n-mer motif
EVLSLAP

SEQ ID NO: 8366 - DNA, 21 bp, synthetic construct
  misc_feature 1..21: note = n-mer motif encoding polynucleotide
  source 1..21: mol_type = other DNA
gaggtgctgtctcttgctccg

SEQ ID NO: 8367 - protein, 7 aa, synthetic construct
  REGION 1..7: note = n-mer motif
TNGVLYT

SEQ ID NO: 8368 - DNA, 21 bp, synthetic construct
  misc_feature 1..21: note = n-mer motif encoding polynucleotide
  source 1..21: mol_type = other DNA
acaaacggcgtcctttacacg

SEQ ID NO: 8369 - protein, 7 aa, synthetic construct
  REGION 1..7: note = n-mer motif
RFVGSVP

SEQ ID NO: 8370 - DNA, 21 bp, synthetic construct
  misc_feature 1..21: note = n-mer motif encoding polynucleotide
  source 1..21: mol_type = other DNA
aggtttgtgggtagtgttccg

SEQ ID NO: 8371 - protein, 7 aa, synthetic construct
  REGION 1..7: note = n-mer motif
TNGYRED

SEQ ID NO: 8372 - DNA, 21 bp, synthetic construct
  misc_feature 1..21: note = n-mer motif encoding polynucleotide
  source 1..21: mol_type = other DNA
actaatggttatagggaggat

SEQ ID NO: 8373 - protein, 7 aa, synthetic construct
  REGION 1..7: note = n-mer motif
LESAAMI

SEQ ID NO: 8374 - DNA, 21 bp, synthetic construct
  misc_feature 1..21: note = n-mer motif encoding polynucleotide
  source 1..21: mol_type = other DNA
ctggagtcggctgctatgatt

SEQ ID NO: 8375 - protein, 7 aa, synthetic construct
  REGION 1..7: note = n-mer motif
VPLPSGK

SEQ ID NO: 8376 - DNA, 21 bp, synthetic construct
  misc_feature 1..21: note = n-mer motif encoding polynucleotide
  source 1..21: mol_type = other DNA
gttcctctgccgagtgggaag

SEQ ID NO: 8377 - protein, 7 aa, synthetic construct
  REGION 1..7: note = n-mer motif
NSKDVQR

SEQ ID NO: 8378 - DNA, 21 bp, synthetic construct
  misc_feature 1..21: note = n-mer motif encoding polynucleotide
  source 1..21: mol_type = other DNA
aactccaaagacgtacaaaga

SEQ ID NO: 8379 - protein, 7 aa, synthetic construct
  REGION 1..7: note = n-mer motif
GVGGTYS

SEQ ID NO: 8380 - DNA, 21 bp, synthetic construct
  misc_feature 1..21: note = n-mer motif encoding polynucleotide
  source 1..21: mol_type = other DNA
ggagttgggggcacatacagt

SEQ ID NO: 8381 - protein, 7 aa, synthetic construct
  REGION 1..7: note = n-mer motif
LTDKMTS

SEQ ID NO: 8382 - DNA, 21 bp, synthetic construct
  misc_feature 1..21: note = n-mer motif encoding polynucleotide
  source 1..21: mol_type = other DNA
ttgactgataagatgacgtcg

SEQ ID NO: 8383 - protein, 7 aa, synthetic construct
  REGION 1..7: note = n-mer motif
SGAAAAT

SEQ ID NO: 8384 - DNA, 21 bp, synthetic construct
  misc_feature 1..21: note = n-mer motif encoding polynucleotide
  source 1..21: mol_type = other DNA
agcggggccgcagccgccacc

SEQ ID NO: 8385 - protein, 7 aa, synthetic construct
  REGION 1..7: note = n-mer motif
MVTTTNT

SEQ ID NO: 8386 - DNA, 21 bp, synthetic construct
  misc_feature 1..21: note = n-mer motif encoding polynucleotide
  source 1..21: mol_type = other DNA
atggtgacgaccacaaacacc

SEQ ID NO: 8387 - protein, 7 aa, synthetic construct
  REGION 1..7: note = n-mer motif
TSLGLMQ

SEQ ID NO: 8388 - DNA, 21 bp, synthetic construct
  misc_feature 1..21: note = n-mer motif encoding polynucleotide
  source 1..21: mol_type = other DNA
actagccttggcttaatgcaa

SEQ ID NO: 8389 - protein, 7 aa, synthetic construct
  REGION 1..7: note = n-mer motif
LVHLGTS

SEQ ID NO: 8390 - DNA, 21 bp, synthetic construct
  misc_feature 1..21: note = n-mer motif encoding polynucleotide
  source 1..21: mol_type = other DNA
ttggttcatcttgggacttct

SEQ ID NO: 8391 - protein, 7 aa, synthetic construct
  REGION 1..7: note = n-mer motif
NGMGDVT

SEQ ID NO: 8392 - DNA, 21 bp, synthetic construct
  misc_feature 1..21: note = n-mer motif encoding polynucleotide
  source 1..21: mol_type = other DNA
aatgggatgggtgatgtgacg

SEQ ID NO: 8393 - protein, 7 aa, synthetic construct
  REGION 1..7: note = n-mer motif
LNSPLHV

SEQ ID NO: 8394 - DNA, 21 bp, synthetic construct
  misc_feature 1..21: note = n-mer motif encoding polynucleotide
  source 1..21: mol_type = other DNA
ctgaatagtccgctgcatgtt

SEQ ID NO: 8395 - protein, 7 aa, synthetic construct
  REGION 1..7: note = n-mer motif
GSRESVR

SEQ ID NO: 8396 - DNA, 21 bp, synthetic construct
  misc_feature 1..21: note = n-mer motif encoding polynucleotide
  source 1..21: mol_type = other DNA
gggagtagggagagtgtgcgt

SEQ ID NO: 8397 - protein, 7 aa, synthetic construct
  REGION 1..7: note = n-mer motif
DNSPMDL

SEQ ID NO: 8398 - DNA, 21 bp, synthetic construct
  misc_feature 1..21: note = n-mer motif encoding polynucleotide
  source 1..21: mol_type = other DNA
gacaacagccccatggaccta

SEQ ID NO: 8399 - protein, 7 aa, synthetic construct
  REGION 1..7: note = n-mer motif
VVSPQPV

SEQ ID NO: 8400 - DNA, 21 bp, synthetic construct
  misc_feature 1..21: note = n-mer motif encoding polynucleotide
  source 1..21: mol_type = other DNA
gtggtttcgcctcaaccggtg

SEQ ID NO: 8401 - protein, 7 aa, synthetic construct
  REGION 1..7: note = n-mer motif
STINTLM

SEQ ID NO: 8402 - DNA, 21 bp, synthetic construct
  misc_feature 1..21: note = n-mer motif encoding polynucleotide
  source 1..21: mol_type = other DNA
agtactattaatactctgatg

SEQ ID NO: 8403 - protein, 7 aa, synthetic construct
  REGION 1..7: note = n-mer motif
THGDAGG

SEQ ID NO: 8404 - DNA, 21 bp, synthetic construct
  misc_feature 1..21: note = n-mer motif encoding polynucleotide
  source 1..21: mol_type = other DNA
actcatggggatgctggtggg

SEQ ID NO: 8405 - protein, 7 aa, synthetic construct
  REGION 1..7: note = n-mer motif
AVLAGSS

SEQ ID NO: 8406 - DNA, 21 bp, synthetic construct
  misc_feature 1..21: note = n-mer motif encoding polynucleotide
  source 1..21: mol_type = other DNA
gcggttctggcggggtctagt

SEQ ID NO: 8407 - protein, 7 aa, synthetic construct
  REGION 1..7: note = n-mer motif
YTSGTGT

SEQ ID NO: 8408 - DNA, 21 bp, synthetic construct
  misc_feature 1..21: note = n-mer motif encoding polynucleotide
  source 1..21: mol_type = other DNA
tacacctcgggcacagggaca

SEQ ID NO: 8409 - protein, 7 aa, synthetic construct
  REGION 1..7: note = n-mer motif
GPDTGAM

SEQ ID NO: 8410 - DNA, 21 bp, synthetic construct
  misc_feature 1..21: note = n-mer motif encoding polynucleotide
  source 1..21: mol_type = other DNA
ggccccgacacaggcgcgatg

SEQ ID NO: 8411 - protein, 7 aa, synthetic construct
  REGION 1..7: note = n-mer motif
SGMQAEA

SEQ ID NO: 8412 - DNA, 21 bp, synthetic construct
  misc_feature 1..21: note = n-mer motif encoding polynucleotide
  source 1..21: mol_type = other DNA
tcgggtatgcaggcggaggct

SEQ ID NO: 8413 - protein, 7 aa, synthetic construct
  REGION 1..7: note = n-mer motif
LATHDAR

SEQ ID NO: 8414 - DNA, 21 bp, synthetic construct
  misc_feature 1..21: note = n-mer motif encoding polynucleotide
  source 1..21: mol_type = other DNA
ctcgcaacgcacgacgcacga

SEQ ID NO: 8415 - protein, 7 aa, synthetic construct
  REGION 1..7: note = n-mer motif
YDRIMSS

SEQ ID NO: 8416 - DNA, 21 bp, synthetic construct
  misc_feature 1..21: note = n-mer motif encoding polynucleotide
  source 1..21: mol_type = other DNA
tacgaccgcataatgtcatct

SEQ ID NO: 8417 - protein, 7 aa, synthetic construct
  REGION 1..7: note = n-mer motif
RHHGTES

SEQ ID NO: 8418 - DNA, 21 bp, synthetic construct
  misc_feature 1..21: note = n-mer motif encoding polynucleotide
  source 1..21: mol_type = other DNA
cgtcatcatggtactgagagt

SEQ ID NO: 8419 - protein, 7 aa, synthetic construct
  REGION 1..7: note = n-mer motif
MAVKSPP

SEQ ID NO: 8420 - DNA, 21 bp, synthetic construct
  misc_feature 1..21: note = n-mer motif encoding polynucleotide
  source 1..21: mol_type = other DNA
atggctgtgaagtcgccgccg

SEQ ID NO: 8421 - protein, 7 aa, synthetic construct
  REGION 1..7: note = n-mer motif
EVRDTKT

SEQ ID NO: 8422 - DNA, 21 bp, synthetic construct
  misc_feature 1..21: note = n-mer motif encoding polynucleotide
  source 1..21: mol_type = other DNA
gaagttcgggacacaaaaacg

SEQ ID NO: 8423 - protein, 7 aa, synthetic construct
  REGION 1..7: note = n-mer motif
GFVQSRM

SEQ ID NO: 8424 - DNA, 21 bp, synthetic construct
  misc_feature 1..21: note = n-mer motif encoding polynucleotide
  source 1..21: mol_type = other DNA
gggtttgttcagagtcggatg

SEQ ID NO: 8425 - protein, 7 aa, synthetic construct
  REGION 1..7: note = n-mer motif
VLAAVDR

SEQ ID NO: 8426 - DNA, 21 bp, synthetic construct
  misc_feature 1..21: note = n-mer motif encoding polynucleotide
  source 1..21: mol_type = other DNA
gtccttgctgccgtcgaccga

SEQ ID NO: 8427 - protein, 7 aa, synthetic construct
  REGION 1..7: note = n-mer motif
VTTVPPV

SEQ ID NO: 8428 - DNA, 21 bp, synthetic construct
  misc_feature 1..21: note = n-mer motif encoding polynucleotide
  source 1..21: mol_type = other DNA
gtgactacggttcctcctgtg

SEQ ID NO: 8429 - protein, 7 aa, synthetic construct
  REGION 1..7: note = n-mer motif
HFSSETS

SEQ ID NO: 8430 - DNA, 21 bp, synthetic construct
  misc_feature 1..21: note = n-mer motif encoding polynucleotide
  source 1..21: mol_type = other DNA
cacttctcttccgaaacttct

SEQ ID NO: 8431 - protein, 7 aa, synthetic construct
  REGION 1..7: note = n-mer motif
TTVTVSL

SEQ ID NO: 8432 - DNA, 21 bp, synthetic construct
  misc_feature 1..21: note = n-mer motif encoding polynucleotide
  source 1..21: mol_type = other DNA
acgacggtgacggtgtcgttg

SEQ ID NO: 8433 - protein, 7 aa, synthetic construct
  REGION 1..7: note = n-mer motif
AESRLFV

SEQ ID NO: 8434 - DNA, 21 bp, synthetic construct
  misc_feature 1..21: note = n-mer motif encoding polynucleotide
  source 1..21: mol_type = other DNA
gcggagagtaggctgtttgtg

SEQ ID NO: 8435 - protein, 7 aa, synthetic construct
  REGION 1..7: note = n-mer motif
LSGGFTA

SEQ ID NO: 8436 - DNA, 21 bp, synthetic construct
  misc_feature 1..21: note = n-mer motif encoding polynucleotide
  source 1..21: mol_type = other DNA
ttgagtggtggttttacggcg

SEQ ID NO: 8437 - protein, 7 aa, synthetic construct
  REGION 1..7: note = n-mer motif
NSDLASP

SEQ ID NO: 8438 - DNA, 21 bp, synthetic construct
  misc_feature 1..21: note = n-mer motif encoding polynucleotide
  source 1..21: mol_type = other DNA
aatagtgatttggcgtctcct

SEQ ID NO: 8439 - protein, 7 aa, synthetic construct
  REGION 1..7: note = n-mer motif
LDHGASA

SEQ ID NO: 8440 - DNA, 21 bp, synthetic construct
  misc_feature 1..21: note = n-mer motif encoding polynucleotide
  source 1..21: mol_type = other DNA
ttagaccacggagcgtcggcg

SEQ ID NO: 8441 - protein, 7 aa, synthetic construct
  REGION 1..7: note = n-mer motif
YGSNDLS

SEQ ID NO: 8442 - DNA, 21 bp, synthetic construct
  misc_feature 1..21: note = n-mer motif encoding polynucleotide
  source 1..21: mol_type = other DNA
tatgggagtaatgatctgagt

SEQ ID NO: 8443 - protein, 7 aa, synthetic construct
  REGION 1..7: note = n-mer motif
VIASNEH

SEQ ID NO: 8444 - DNA, 21 bp, synthetic construct
  misc_feature 1..21: note = n-mer motif encoding polynucleotide
  source 1..21: mol_type = other DNA
gtcatagcctcaaacgaacac

SEQ ID NO: 8445 - protein, 7 aa, synthetic construct
  REGION 1..7: note = n-mer motif
LTGSIGL

SEQ ID NO: 8446 - DNA, 21 bp, synthetic construct
  misc_feature 1..21: note = n-mer motif encoding polynucleotide
  source 1..21: mol_type = other DNA
ttaactgggtcaattggactc

SEQ ID NO: 8447 - protein, 7 aa, synthetic construct
  REGION 1..7: note = n-mer motif
HLSRDHS

SEQ ID NO: 8448 - DNA, 21 bp, synthetic construct
  misc_feature 1..21: note = n-mer motif encoding polynucleotide
  source 1..21: mol_type = other DNA
cacctgtcacgtgaccactca

SEQ ID NO: 8449 - protein, 7 aa, synthetic construct
  REGION 1..7: note = n-mer motif
NLRGEHT

SEQ ID NO: 8450 - DNA, 21 bp, synthetic construct
  misc_feature 1..21: note = n-mer motif encoding polynucleotide
  source 1..21: mol_type = other DNA
aatttgcgtggggagcatacg

SEQ ID NO: 8451 - protein, 7 aa, synthetic construct
  REGION 1..7: note = n-mer motif
ILVDALA

SEQ ID NO: 8452 - DNA, 21 bp, synthetic construct
  misc_feature 1..21: note = n-mer motif encoding polynucleotide
  source 1..21: mol_type = other DNA
attctggttgatgctcttgcg

SEQ ID NO: 8453 - protein, 7 aa, synthetic construct
  REGION 1..7: note = n-mer motif
SGYDTSV

SEQ ID NO: 8454 - DNA, 21 bp, synthetic construct
  misc_feature 1..21: note = n-mer motif encoding polynucleotide
  source 1..21: mol_type = other DNA
agtgggtatgatacgtcggtt

SEQ ID NO: 8455 - protein, 7 aa, synthetic construct
  REGION 1..7: note = n-mer motif
HKDKWVG

SEQ ID NO: 8456 - DNA, 21 bp, synthetic construct
  misc_feature 1..21: note = n-mer motif encoding polynucleotide
  source 1..21: mol_type = other DNA
cacaaagacaaatgggttggg

SEQ ID NO: 8457 - protein, 7 aa, synthetic construct
  REGION 1..7: note = n-mer motif
MTGNSFV

SEQ ID NO: 8458 - DNA, 21 bp, synthetic construct
  misc_feature 1..21: note = n-mer motif encoding polynucleotide
  source 1..21: mol_type = other DNA
atgacaggcaacagcttcgta

SEQ ID NO: 8459 - protein, 7 aa, synthetic construct
  REGION 1..7: note = n-mer motif
YTVGSLA

SEQ ID NO: 8460 - DNA, 21 bp, synthetic construct
  misc_feature 1..21: note = n-mer motif encoding polynucleotide
  source 1..21: mol_type = other DNA
tacaccgttggctcactcgcc

SEQ ID NO: 8461 - protein, 7 aa, synthetic construct
  REGION 1..7: note = n-mer motif
SVSKPFL

SEQ ID NO: 8462 - DNA, 21 bp, synthetic construct
  misc_feature 1..21: note = n-mer motif encoding polynucleotide
  source 1..21: mol_type = other DNA
agtgtgagtaagccttttttg

SEQ ID NO: 8463 - protein, 7 aa, synthetic construct
  REGION 1..7: note = n-mer motif
TVMTSEP

SEQ ID NO: 8464 - DNA, 21 bp, synthetic construct
  misc_feature 1..21: note = n-mer motif encoding polynucleotide
  source 1..21: mol_type = other DNA
acagttatgaccagcgaacct

SEQ ID NO: 8465 - protein, 7 aa, synthetic construct
  REGION 1..7: note = n-mer motif
SMGYVSA

SEQ ID NO: 8466 - DNA, 21 bp, synthetic construct
  misc_feature 1..21: note = n-mer motif encoding polynucleotide
  source 1..21: mol_type = other DNA
tcgatgggttatgtttcggct

SEQ ID NO: 8467 - protein, 7 aa, synthetic construct
  REGION 1..7: note = n-mer motif
ILVDAYA

SEQ ID NO: 8468 - DNA, 21 bp, synthetic construct
  misc_feature 1..21: note = n-mer motif encoding polynucleotide
  source 1..21: mol_type = other DNA
attctggttgatgcttatgcg

SEQ ID NO: 8469 - protein, 7 aa, synthetic construct
  REGION 1..7: note = n-mer motif
QGGTTLR

SEQ ID NO: 8470 - DNA, 21 bp, synthetic construct
  misc_feature 1..21: note = n-mer motif encoding polynucleotide
  source 1..21: mol_type = other DNA
caaggggggactactctacgc

SEQ ID NO: 8471 - protein, 7 aa, synthetic construct
  REGION 1..7: note = n-mer motif
SEGLSRD

SEQ ID NO: 8472 - DNA, 21 bp, synthetic construct
  misc_feature 1..21: note = n-mer motif encoding polynucleotide
  source 1..21: mol_type = other DNA
tcggagggtctttcgcgtgat

SEQ ID NO: 8473 - protein, 7 aa, synthetic construct
  REGION 1..7: note = n-mer motif
FTGGTGT

SEQ ID NO: 8474 - DNA, 21 bp, synthetic construct
  misc_feature 1..21: note = n-mer motif encoding polynucleotide
  source 1..21: mol_type = other DNA
tttactggtggtacgggtact

SEQ ID NO: 8475 - protein, 7 aa, synthetic construct
  REGION 1..7: note = n-mer motif
RSGSGVA

SEQ ID NO: 8476 - DNA, 21 bp, synthetic construct
  misc_feature 1..21: note = n-mer motif encoding polynucleotide
  source 1..21: mol_type = other DNA
cggtcgggctccggagtcgcc

SEQ ID NO: 8477 - protein, 7 aa, synthetic construct
  REGION 1..7: note = n-mer motif
VLASLGP

SEQ ID NO: 8478 - DNA, 21 bp, synthetic construct
  misc_feature 1..21: note = n-mer motif encoding polynucleotide
  source 1..21: mol_type = other DNA
gtgctcgccagtctcggcccc

SEQ ID NO: 8479 - protein, 7 aa, synthetic construct
  REGION 1..7: note = n-mer motif
LVTGMSS

SEQ ID NO: 8480 - DNA, 21 bp, synthetic construct
  misc_feature 1..21: note = n-mer motif encoding polynucleotide
  source 1..21: mol_type = other DNA
cttgtcacgggcatgtcaagc

SEQ ID NO: 8481 - protein, 7 aa, synthetic construct
  REGION 1..7: note = n-mer motif
ALASTQT

SEQ ID NO: 8482 - DNA, 21 bp, synthetic construct
  misc_feature 1..21: note = n-mer motif encoding polynucleotide
  source 1..21: mol_type = other DNA
gcactagcatcgacccaaact

SEQ ID NO: 8483 - protein, 7 aa, synthetic construct
  REGION 1..7: note = n-mer motif
SLVRGLL

SEQ ID NO: 8484 - DNA, 21 bp, synthetic construct
  misc_feature 1..21: note = n-mer motif encoding polynucleotide
  source 1..21: mol_type = other DNA
agtcttgttcggggtttgctg

SEQ ID NO: 8485 - protein, 7 aa, synthetic construct
  REGION 1..7: note = n-mer motif
VGQVPGR

SEQ ID NO: 8486 - DNA, 21 bp, synthetic construct
  misc_feature 1..21: note = n-mer motif encoding polynucleotide
  source 1..21: mol_type = other DNA
gtggggcaagtcccgggtagg

SEQ ID NO: 8487 - protein, 7 aa, synthetic construct
  REGION 1..7: note = n-mer motif
NGPMKAD

SEQ ID NO: 8488 - DNA, 21 bp, synthetic construct
  misc_feature 1..21: note = n-mer motif encoding polynucleotide
  source 1..21: mol_type = other DNA
aacggtccaatgaaagcagac

SEQ ID NO: 8489 - protein, 7 aa, synthetic construct
  REGION 1..7: note = n-mer motif
GPMASVV

SEQ ID NO: 8490 - DNA, 21 bp, synthetic construct
  misc_feature 1..21: note = n-mer motif encoding polynucleotide
  source 1..21: mol_type = other DNA
gggccgatggcgtctgtggtt

SEQ ID NO: 8491 - protein, 7 aa, synthetic construct
  REGION 1..7: note = n-mer motif
LVSGLGP

SEQ ID NO: 8492 - DNA, 21 bp, synthetic construct
  misc_feature 1..21: note = n-mer motif encoding polynucleotide
  source 1..21: mol_type = other DNA
cttgtgagtgggctgggtccg

SEQ ID NO: 8493 - protein, 7 aa, synthetic construct
  REGION 1..7: note = n-mer motif
AADRSVR

SEQ ID NO: 8494 - DNA, 21 bp, synthetic construct
  misc_feature 1..21: note = n-mer motif encoding polynucleotide
  source 1..21: mol_type = other DNA
gcagcagaccgctccgtacgt

SEQ ID NO: 8495 - protein, 7 aa, synthetic construct
  REGION 1..7: note = n-mer motif
AATSGGP

SEQ ID NO: 8496 - DNA, 21 bp, synthetic construct
  misc_feature 1..21: note = n-mer motif encoding polynucleotide
  source 1..21: mol_type = other DNA
gcagccaccagtggcgggccg

SEQ ID NO: 8497 - protein, 7 aa, synthetic construct
  REGION 1..7: note = n-mer motif
RDLTSNV

SEQ ID NO: 8498 - DNA, 21 bp, synthetic construct
  misc_feature 1..21: note = n-mer motif encoding polynucleotide
  source 1..21: mol_type = other DNA
cgagacttaactagcaacgta

SEQ ID NO: 8499 - protein, 7 aa, synthetic construct
  REGION 1..7: note = n-mer motif
IVMSSHI

SEQ ID NO: 8500 - DNA, 21 bp, synthetic construct
  misc_feature 1..21: note = n-mer motif encoding polynucleotide
  source 1..21: mol_type = other DNA
atcgtcatgagctcccacatc

SEQ ID NO: 8501 - protein, 7 aa, synthetic construct
  REGION 1..7: note = n-mer motif
GPLNQSL

SEQ ID NO: 8502 - DNA, 21 bp, synthetic construct
  misc_feature 1..21: note = n-mer motif encoding polynucleotide
  source 1..21: mol_type = other DNA
ggtccgctgaatcagtctttg

SEQ ID NO: 8503 - protein, 7 aa, synthetic construct
  REGION 1..7: note = n-mer motif
TDGRTLH

SEQ ID NO: 8504 - DNA, 21 bp, synthetic construct
  misc_feature 1..21: note = n-mer motif encoding polynucleotide
  source 1..21: mol_type = other DNA
acggatggtaggacgctgcat

SEQ ID NO: 8505 - protein, 7 aa, synthetic construct
  REGION 1..7: note = n-mer motif
TGLQVSF

SEQ ID NO: 8506 - DNA, 21 bp, synthetic construct
  misc_feature 1..21: note = n-mer motif encoding polynucleotide
  source 1..21: mol_type = other DNA
actgggctgcaggttagtttt

SEQ ID NO: 8507 - protein, 7 aa, synthetic construct
  REGION 1..7: note = n-mer motif
RVTTHTP

SEQ ID NO: 8508 - DNA, 21 bp, synthetic construct
  misc_feature 1..21: note = n-mer motif encoding polynucleotide
  source 1..21: mol_type = other DNA
cgtgttactactcatacgccg

SEQ ID NO: 8509 - protein, 7 aa, synthetic construct
  REGION 1..7: note = n-mer motif
EVGSIGS

SEQ ID NO: 8510 - DNA, 21 bp, synthetic construct
  misc_feature 1..21: note = n-mer motif encoding polynucleotide
  source 1..21: mol_type = other DNA
gaggttggtagtattggttct

SEQ ID NO: 8511 - protein, 7 aa, synthetic construct
  REGION 1..7: note = n-mer motif
TDVHSTS

SEQ ID NO: 8512 - DNA, 21 bp, synthetic construct
  misc_feature 1..21: note = n-mer motif encoding polynucleotide
  source 1..21: mol_type = other DNA
acggatgtgcattcgacttcg

SEQ ID NO: 8513 - protein, 7 aa, synthetic construct
  REGION 1..7: note = n-mer motif
TFAISDR

SEQ ID NO: 8514 - DNA, 21 bp, synthetic construct
  misc_feature 1..21: note = n-mer motif encoding polynucleotide
  source 1..21: mol_type = other DNA
acttttgcgatttctgatcgg

SEQ ID NO: 8515 - protein, 7 aa, synthetic construct
  REGION 1..7: note = n-mer motif
TVLAAAH

SEQ ID NO: 8516 - DNA, 21 bp, synthetic construct
  misc_feature 1..21: note = n-mer motif encoding polynucleotide
  source 1..21: mol_type = other DNA
acggtgttggctgcggctcat

SEQ ID NO: 8517 - protein, 7 aa, synthetic construct
  REGION 1..7: note = n-mer motif
MNDAGRD

SEQ ID NO: 8518 - DNA, 21 bp, synthetic construct
  misc_feature 1..21: note = n-mer motif encoding polynucleotide
  source 1..21: mol_type = other DNA
atgaatgatgctgggcgtgat

SEQ ID NO: 8519 - protein, 7 aa, synthetic construct
  REGION 1..7: note = n-mer motif
PAEHYQA

SEQ ID NO: 8520 - DNA, 21 bp, synthetic construct
  misc_feature 1..21: note = n-mer motif encoding polynucleotide
  source 1..21: mol_type = other DNA
ccggctgagcattatcaggct

SEQ ID NO: 8521 - protein, 7 aa, synthetic construct
  REGION 1..7: note = n-mer motif
DRSTAEW

SEQ ID NO: 8522 - DNA, 21 bp, synthetic construct
  misc_feature 1..21: note = n-mer motif encoding polynucleotide
  source 1..21: mol_type = other DNA
gaccgctccacagcagaatgg

SEQ ID NO: 8523 - protein, 7 aa, synthetic construct
  REGION 1..7: note = n-mer motif
LYGGSSA

SEQ ID NO: 8524 - DNA, 21 bp, synthetic construct
  misc_feature 1..21: note = n-mer motif encoding polynucleotide
  source 1..21: mol_type = other DNA
ctctacggagggtcctcggct

SEQ ID NO: 8525 - protein, 7 aa, synthetic construct
  REGION 1..7: note = n-mer motif
VTQAVYV

SEQ ID NO: 8526 - DNA, 21 bp, synthetic construct
  misc_feature 1..21: note = n-mer motif encoding polynucleotide
  source 1..21: mol_type = other DNA
gttacgcaggctgtttatgtt

SEQ ID NO: 8527 - protein, 7 aa, synthetic construct
  REGION 1..7: note = n-mer motif
GVNHAVA

SEQ ID NO: 8528 - DNA, 21 bp, synthetic construct
  misc_feature 1..21: note = n-mer motif encoding polynucleotide
  source 1..21: mol_type = other DNA
ggagtcaaccacgccgtcgcc

SEQ ID NO: 8529 - protein, 7 aa, synthetic construct
  REGION 1..7: note = n-mer motif
DSAPAAR

SEQ ID NO: 8530 - DNA, 21 bp, synthetic construct
  misc_feature 1..21: note = n-mer motif encoding polynucleotide
  source 1..21: mol_type = other DNA
gattcggctccggcggctcgg

SEQ ID NO: 8531 - protein, 7 aa, synthetic construct
  REGION 1..7: note = n-mer motif
DPKTGWR

SEQ ID NO: 8532 - DNA, 21 bp, synthetic construct
  misc_feature 1..21: note = n-mer motif encoding polynucleotide
  source 1..21: mol_type = other DNA
gatccgaagactgggtggcgt

SEQ ID NO: 8533 - protein, 7 aa, synthetic construct
  REGION 1..7: note = n-mer motif
SIVGSVQ

SEQ ID NO: 8534 - DNA, 21 bp, synthetic construct
  misc_feature 1..21: note = n-mer motif encoding polynucleotide
  source 1..21: mol_type = other DNA
tcaatcgtaggctcagtccaa

SEQ ID NO: 8535 - protein, 7 aa, synthetic construct
  REGION 1..7: note = n-mer motif
DSDSGRR

SEQ ID NO: 8536 - DNA, 21 bp, synthetic construct
  misc_feature 1..21: note = n-mer motif encoding polynucleotide
  source 1..21: mol_type = other DNA
gattctgatagtgggcggcgg

SEQ ID NO: 8537 - protein, 7 aa, synthetic construct
  REGION 1..7: note = n-mer motif
EQYLGSP

SEQ ID NO: 8538 - DNA, 21 bp, synthetic construct
  misc_feature 1..21: note = n-mer motif encoding polynucleotide
  source 1..21: mol_type = other DNA
gagcagtatctgggttctccg

SEQ ID NO: 8539 - protein, 7 aa, synthetic construct
  REGION 1..7: note = n-mer motif
LSLDRPS

SEQ ID NO: 8540 - DNA, 21 bp, synthetic construct
  misc_feature 1..21: note = n-mer motif encoding polynucleotide
  source 1..21: mol_type = other DNA
ctaagtctagaccgaccctcg

SEQ ID NO: 8541 - protein, 7 aa, synthetic construct
  REGION 1..7: note = n-mer motif
MGDIVTL

SEQ ID NO: 8542 - DNA, 21 bp, synthetic construct
  misc_feature 1..21: note = n-mer motif encoding polynucleotide
  source 1..21: mol_type = other DNA
atgggggatattgttacgctt

SEQ ID NO: 8543 - protein, 7 aa, synthetic construct
  REGION 1..7: note = n-mer motif
SFRDTVP

SEQ ID NO: 8544 - DNA, 21 bp, synthetic construct
  misc_feature 1..21: note = n-mer motif encoding polynucleotide
  source 1..21: mol_type = other DNA
agttttagggatacggtgcct

SEQ ID NO: 8545 - protein, 7 aa, synthetic construct
  REGION 1..7: note = n-mer motif
RGLSDPV

SEQ ID NO: 8546 - DNA, 21 bp, synthetic construct
  misc_feature 1..21: note = n-mer motif encoding polynucleotide
  source 1..21: mol_type = other DNA
cgggggctgtctgatccggtg

SEQ ID NO: 8547 - protein, 7 aa, synthetic construct
  REGION 1..7: note = n-mer motif
TGGLLYS

SEQ ID NO: 8548 - DNA, 21 bp, synthetic construct
  misc_feature 1..21: note = n-mer motif encoding polynucleotide
  source 1..21: mol_type = other DNA
actggtgggcttctttatagt

SEQ ID NO: 8549 - protein, 7 aa, synthetic construct
  REGION 1..7: note = n-mer motif
VVLSGIS

SEQ ID NO: 8550 - DNA, 21 bp, synthetic construct
  misc_feature 1..21: note = n-mer motif encoding polynucleotide
  source 1..21: mol_type = other DNA
gtggttttgtcggggatttct

SEQ ID NO: 8551 - protein, 7 aa, synthetic construct
  REGION 1..7: note = n-mer motif
GVAGTYL

SEQ ID NO: 8552 - DNA, 21 bp, synthetic construct
  misc_feature 1..21: note = n-mer motif encoding polynucleotide
  source 1..21: mol_type = other DNA
ggggtggctgggacgtatctg

SEQ ID NO: 8553 - protein, 7 aa, synthetic construct
  REGION 1..7: note = n-mer motif
LNGSHGP

SEQ ID NO: 8554 - DNA, 21 bp, synthetic construct
  misc_feature 1..21: note = n-mer motif encoding polynucleotide
  source 1..21: mol_type = other DNA
ctgaatgggtcgcatgggccg

SEQ ID NO: 8555 - protein, 7 aa, synthetic construct
  REGION 1..7: note = n-mer motif
PSGALMT

SEQ ID NO: 8556 - DNA, 21 bp, synthetic construct
  misc_feature 1..21: note = n-mer motif encoding polynucleotide
  source 1..21: mol_type = other DNA
ccttcaggcgccttgatgacg

SEQ ID NO: 8557 - protein, 7 aa, synthetic construct
  REGION 1..7: note = n-mer motif
LSLTDGV

SEQ ID NO: 8558 - DNA, 21 bp, synthetic construct
  misc_feature 1..21: note = n-mer motif encoding polynucleotide
  source 1..21: mol_type = other DNA
ttgtccttaaccgacggagtg

SEQ ID NO: 8559 - protein, 7 aa, synthetic construct
  REGION 1..7: note = n-mer motif
GRDLTPA

SEQ ID NO: 8560 - DNA, 21 bp, synthetic construct
  misc_feature 1..21: note = n-mer motif encoding polynucleotide
  source 1..21: mol_type = other DNA
gggcgtgacctgactccagcg

SEQ ID NO: 8561 - protein, 7 aa, synthetic construct
  REGION 1..7: note = n-mer motif
AGHSNAV

SEQ ID NO: 8562 - DNA, 21 bp, synthetic construct
  misc_feature 1..21: note = n-mer motif encoding polynucleotide
  source 1..21: mol_type = other DNA
gctgggcattctaatgcggtt

SEQ ID NO: 8563 - protein, 7 aa, synthetic construct
  REGION 1..7: note = n-mer motif
GVAGTDS

SEQ ID NO: 8564 - DNA, 21 bp, synthetic construct
  misc_feature 1..21: note = n-mer motif encoding polynucleotide
  source 1..21: mol_type = other DNA
ggggtggctgggacggattct

SEQ ID NO: 8565 - protein, 7 aa, synthetic construct
  REGION 1..7: note = n-mer motif
AELGIRY

SEQ ID NO: 8566 - DNA, 21 bp, synthetic construct
  misc_feature 1..21: note = n-mer motif encoding polynucleotide
  source 1..21: mol_type = other DNA
gctgagctggggattaggtat

SEQ ID NO: 8567 - protein, 7 aa, synthetic construct
  REGION 1..7: note = n-mer motif
PLSNAAL

SEQ ID NO: 8568 - DNA, 21 bp, synthetic construct
  misc_feature 1..21: note = n-mer motif encoding polynucleotide
  source 1..21: mol_type = other DNA
cctctatctaacgcagcactg

SEQ ID NO: 8569 - protein, 7 aa, synthetic construct
  REGION 1..7: note = n-mer motif
IGLSVST

SEQ ID NO: 8570 - DNA, 21 bp, synthetic construct
  misc_feature 1..21: note = n-mer motif encoding polynucleotide
  source 1..21: mol_type = other DNA
attgggctgtctgtttctact

SEQ ID NO: 8571 - protein, 7 aa, synthetic construct
  REGION 1..7: note = n-mer motif
RSITIGP

SEQ ID NO: 8572 - DNA, 21 bp, synthetic construct
  misc_feature 1..21: note = n-mer motif encoding polynucleotide
  source 1..21: mol_type = other DNA
cgttcgattactattgggccg

SEQ ID NO: 8573 - protein, 7 aa, synthetic construct
  REGION 1..7: note = n-mer motif
GLVRIQD

SEQ ID NO: 8574 - DNA, 21 bp, synthetic construct
  misc_feature 1..21: note = n-mer motif encoding polynucleotide
  source 1..21: mol_type = other DNA
ggactggttcggatccaagac

SEQ ID NO: 8575 - protein, 7 aa, synthetic construct
  REGION 1..7: note = n-mer motif
LSGIMVS

SEQ ID NO: 8576 - DNA, 21 bp, synthetic construct
  misc_feature 1..21: note = n-mer motif encoding polynucleotide
  source 1..21: mol_type = other DNA
ttgtcggggattatggtttcg

SEQ ID NO: 8577 - protein, 7 aa, synthetic construct
  REGION 1..7: note = n-mer motif
SWQSDTD

SEQ ID NO: 8578 - DNA, 21 bp, synthetic construct
  misc_feature 1..21: note = n-mer motif encoding polynucleotide
  source 1..21: mol_type = other DNA
tcgtggcagtctgatacggat

SEQ ID NO: 8579 - protein, 9 aa, synthetic construct
  REGION 1..9: note = n-mer insert
  SITE 1: note = MISC_FEATURE - X is any amino acid and the number of amino acids is 0, 1, 2, or3
  REGION 3..4: note = MISC_FEATURE - X is any amino acid
  SITE 7: note = MISC_FEATURE - X is any amino acid
  SITE 9: note = MISC_FEATURE - X is any amino acid and the number of amino acids is 0, 1, 2, 3,4, 5, 6 ,or 7
XPXXGTXRX

SEQ ID NO: 8580 - protein, 9 aa, synthetic construct
  REGION 1..9: note = n-mer insert
  SITE 1: note = MISC_FEATURE - X is any amino acid and the number of amino acids is 0, 1, 2, or3
  SITE 3: note = MISC_FEATURE - X is any amino acid
  SITE 7: note = MISC_FEATURE - X is any amino acid
  SITE 9: note = MISC_FEATURE - X is any amino acid and the number of amino acids is 0, 1, 2, 3,4, 5, 6, or 7
XPXQGTXRX

SEQ ID NO: 8581 - protein, 9 aa, synthetic construct
  REGION 1..9: note = n-mer insert
  SITE 1: note = MISC_FEATURE - X is any amino acid and the number of amino acids is 0, 1, 2, or3
  SITE 3: note = MISC_FEATURE - X is any amino acid
  SITE 7: note = MISC_FEATURE - X is any amino acid
  SITE 9: note = MISC_FEATURE - X is any amino acid and the number of amino acids is 0, 1, 2, 3,4, 5, 6, or 7
XPXQGTXRX

SEQ ID NO: 8582 - DNA, 24 bp, synthetic construct
  misc_feature 1..24: note = TLR9i oligonucleotide
  source 1..24: mol_type = other DNA
ttagggttagggttagggttaggg

SEQ ID NO: 8583 - DNA, 25 bp, synthetic construct
  misc_feature 1..25: note = TLR9i oligonucleotide
  source 1..25: mol_type = other DNA
tttagggttagggttagggttaggg

SEQ ID NO: 8584 - DNA, 90 bp, synthetic construct
  misc_feature 1..90: note = TLR9i oligonucleotide
  source 1..90: mol_type = other DNA
tttagggttagggttagggttagggaaaaatttagggttagggttagggttagggaaaaatttagggttagggttagggttagggaaaaa

SEQ ID NO: 8585 - DNA, 177 bp, synthetic construct
  misc_feature 1..177: note = TLR9i oligonucleotide
  source 1..177: mol_type = other DNA
tttagggttagggttagggttagggaaaaatttagggttagggttagggttagggaaaaatttagggttagggttagggttagggaaaaatgcagcggtaagttcccatccaggttttttgcagcggtaagttcccatccaggttttttgcagcggtaagttcccatccaggttttt

SEQ ID NO: 8586 - protein, 10 aa, synthetic construct
  REGION 1..10: note = n-mer insert
  REGION 1..3: note = MISC_FEATURE - X is any amino acid
  SITE 5: note = MISC_FEATURE - X is any amino acid
  SITE 9: note = MISC_FEATURE - X is any amino acid
XXXPXQGTXR

SEQ ID NO: 8587 - protein, 9 aa, synthetic construct
  REGION 1..9: note = synthetic
AQRSVGSVY

SEQ ID NO: 8588 - protein, 9 aa, synthetic construct
  REGION 1..9: note = synthetic
AQKTVGTVY

SEQ ID NO: 8589 - protein, 9 aa, synthetic construct
  REGION 1..9: note = synthetic
DGREQQKLW

SEQ ID NO: 8590 - DNA, 22 bp, synthetic construct
  misc_feature 1..22: note = synthetic
  source 1..22: mol_type = other DNA
gaaagttgccgtccgtgtgagg

SEQ ID NO: 8591 - DNA, 21 bp, synthetic construct
  misc_feature 1..21: note = synthetic
  source 1..21: mol_type = other DNA
acaagtggccacaaaccacca

SEQ ID NO: 8592 - DNA, 20 bp, synthetic construct
  misc_feature 1..20: note = synthetic
  source 1..20: mol_type = other DNA
ggttttgaacccagccggtc

SEQ ID NO: 8593 - DNA, 25 bp, synthetic construct
  misc_feature 1..25: note = synthetic
  source 1..25: mol_type = other DNA
ttcactgcattctagttgtggtttg

SEQ ID NO: 8594 - DNA, 23 bp, synthetic construct
  misc_feature 1..23: note = synthetic
  source 1..23: mol_type = other DNA
ccatacgatgttccagattacgc

SEQ ID NO: 8595 - DNA, 26 bp, synthetic construct
  misc_feature 1..26: note = synthetic
  source 1..26: mol_type = other DNA
caatgtatcttatcatgtctgctcga

SEQ ID NO: 8596 - protein, 7 aa, synthetic construct
  REGION 1..7: note = synthetic
NGSGQNQ

SEQ ID NO: 8597 - protein, 7 aa, synthetic construct
  REGION 1..7: note = synthetic
DGAATKN

SEQ ID NO: 8598 - protein, 7 aa, synthetic construct
  REGION 1..7: note = synthetic
DGQSSKS

SEQ ID NO: 8599 - protein, 12 aa, synthetic construct
  REGION 1..12: note = synthetic
SAQRSVGSVYAQ

SEQ ID NO: 8600 - protein, 12 aa, synthetic construct
  REGION 1..12: note = synthetic
SAQKTVGTVYAQ

SEQ ID NO: 8601 - protein, 12 aa, synthetic construct
  REGION 1..12: note = synthetic
SAQWVLPSGGAQ

SEQ ID NO: 8602 - protein, 12 aa, synthetic construct
  REGION 1..12: note = synthetic
SDGREQQKLWAQ

SEQ ID NO: 8603 - protein, 12 aa, synthetic construct
  REGION 1..12: note = synthetic
SAQPTQGTVRAQ

SEQ ID NO: 8604 - protein, 12 aa, synthetic construct
  REGION 1..12: note = synthetic
SAQPSQGTLRAQ

SEQ ID NO: 8605 - protein, 12 aa, synthetic construct
  REGION 1..12: note = synthetic
SAQPTQGTLRAQ

SEQ ID NO: 8606 - protein, 12 aa, synthetic construct
  REGION 1..12: note = synthetic
SAQPTQGTFRAQ

SEQ ID NO: 8607 - protein, 12 aa, synthetic construct
  REGION 1..12: note = synthetic
SAQTDALTTKAQ

SEQ ID NO: 8608 - protein, 12 aa, synthetic construct
  REGION 1..12: note = synthetic
SAQSTIPTMKAQ

SEQ ID NO: 8609 - protein, 12 aa, synthetic construct
  REGION 1..12: note = synthetic
SAQRVDPSGLAQ

SEQ ID NO: 8610 - protein, 12 aa, synthetic construct
  REGION 1..12: note = synthetic
SAQVVSDYTVAQ

SEQ ID NO: 8611 - protein, 12 aa, synthetic construct
  REGION 1..12: note = synthetic
SDGTLAVPFKAQ

SEQ ID NO: 8612 - protein, 12 aa, synthetic construct
  REGION 1..12: note = synthetic
SDGTLAVPFKAQ

SEQ ID NO: 8613 - protein, 12 aa, synthetic construct
  REGION 1..12: note = synthetic
SAQWSTNAGYAQ

SEQ ID NO: 8614 - protein, 21 aa, synthetic construct
  REGION 1..21: note = synthetic
NNKNNKNNKNNKNNKNNKNNK

What is claimed is:

1. A composition comprising:
a targeting moiety effective to target a central nervous system (CNS) cell, wherein the targeting moiety comprises an n-mer insert optionally comprising or consisting of a P-motif or a double valine motif, or both,
wherein the P-motif comprises or consists of the amino acid sequence XₘPX₁X₂GTX₃RXₙ (SEQ ID NO: 8579), wherein X₁, X₂, X₃, Xₘ, and Xₙ, are each independently selected from any amino acid, wherein m is 0, 1, 2, or 3, and wherein n is 0, 1, 2, 3, 4, 5, 6, or 7,
wherein the double valine motif comprises or consists of the amino acid sequence XₘX₁X₂VX₃X₄VX₅Xₙ wherein X₁, X₂, X₃, Xₘ, and Xₙ, are each independently selected from any amino acid, wherein m is 0, 1, 2, or 3, and wherein n is 0, 1, 2, 3, 4, 5, 6, or 7; and
optionally a cargo, wherein the cargo is coupled to or is otherwise associated with the targeting moiety.

2. The composition of claim 1, wherein X₂ of the P motif is Q, P, E, or H.

3. The composition of claim 1, wherein X₁ of the P motif is a polar amino acid, optionally a polar uncharged amino acid.

4. The composition of claim 1, wherein X₃ of the P motif is a nonpolar amino acid.

5. The composition of claim 1, wherein X₁ of the double valine motif is R, K, V, or W.

6. The composition of claim 1, wherein X₂ of the double valine motif is T, S, V, Y or R.

7. The composition of claim 1, wherein X₃ of the double valine motif is G, P, or S.

8. The composition of claim 1, wherein X₄ of the double valine motif is S, D, or T.

9. The composition of claim 1, wherein X₅ of the double valine motif is Y, G, S, or L.

10. The composition of claim 1, wherein the targeting moiety comprises two or more n-mer inserts, optionally wherein each n-mer insert comprises or consists of a P-motif, wherein at least one of the P-motifs comprise or consists of the amino acid sequence XₘPX₁X₂GTX₃RXₙ (SEQ ID NO: 8579), wherein X₁, X₂, X₃, Xₘ, and Xₙ, are each independently selected from any amino acid, wherein m is 0, 1, 2, or 3, and wherein n is 0, 1, 2, 3, 4, 5, 6, or 7, optionally wherein X₂ of the P motif is Q, P, E, or H, optionally wherein the X₁ of the P motif is a polar amino acid, optionally a polar uncharged amino acid, and optionally wherein X₃ of the P motif is a nonpolar amino acid.

11. The composition of claim 1, wherein the n-mer insert(s) and/or at least one P-motif and/or double valine motif is selected from any one n-mer insert and/or is encoded by a polynucleotide as set forth in one or more of SEQ ID NOs: 332-582 (Table 7), SEQ ID NOs: 583-8578 (Table 8), SEQ ID NOs: 3-819, 21-22, 24, 200, 202, 204, 212, 218, 224, 226, 228, 286, 234, 258, 260, 647, 649, 923, 1069, 1077, 1265, 2439, 2529, 2759, 3283, 3553, 3923, 4005, 4173, 4537, 4593, 4599, 4601, 4605, 4619, 4665, 4751, 4759, 4825, 4909, 4933, 5013, 5091, 5107, 5127, 5131, 5165, 5177, 5181, 5187, 5189, 5191, 5277, 5287, 5401, 5433, 5631, 5633, 5731, 5741, 5937, 6019, 6045, 6139, 6169, 6497, 7335, 8033, 8269, 8596-8613, (FIGS. 15A, 15B, 17A, 16A, 16B, 16C, and 19A-19C).

12. The composition of claim 1, wherein the n-mer insert is 3-25 or 3-15 amino acids in length.

13. The composition of claim 1, wherein
a. X₁ of the P motif is S, T, N, Q, C, Y or A,
b. X₂ of the P motif is Q, P, E, or H,
c. X₃ is G, A, M, W, L, V, F, or I, or
d. any combination thereof.

14. The composition of claim 1, wherein the targeting moiety comprises a polypeptide, a polynucleotide, a lipid, a polymer, a sugar, or any combination thereof, wherein the polypeptide, the polynucleotide, the lipid, the polymer, the sugar, or any combination thereof is operably coupled to the n-mer insert(s).

15. The composition of claim 1, wherein the targeting moiety comprises a viral protein.

16. The composition of claim 15, wherein the viral protein is a capsid protein.

17. The composition of claim 15, wherein the n-mer insert(s) is/are incorporated into the viral protein such that at least the n-mer insert is located between two amino acids of the viral protein such that at least the n-mer insert is external to a viral capsid.

18. The composition of claim 15, wherein the viral protein is an adeno associated virus (AAV) protein.

19. The composition of claim 18, wherein the AAV protein is an AAV capsid protein.

20. The composition of claim 19, wherein one or more of the n-mer insert(s) are each incorporated into the AAV protein such that the n-mer insert, optionally the P motif(s) and/or double valine motif(s), is/are inserted between any two contiguous amino acids independently selected from amino acids 262-269, 327-332, 382-386, 452-460, 488-505, 527-539, 545-558, 581-593, 598-599, 704-714, or any combination thereof in an AAV9 capsid polypeptide or in an analogous position in an AAV1, AAV2, AAV3, AAV4, AAV5, AAV6, AAV7, AAV8, AAV rh.74, AAV rh.10, AAV12, AAV.DJ, AAV.ie, AAV1.9-3, AAV.Anc80, AAV.Anc80L65, AAV2.7m8, or AAV8BP2 capsid polypeptide.

21. The composition of claim 19, wherein at least one n-mer insert is incorporated into the AAV protein such that at least the P motif and/or double valine motif is inserted between amino acids 588 and 589 in an AAV9 capsid polypeptide or in an analogous position in an AAV1, AAV2, AAV3, AAV4, AAV5, AAV6, AAV7, AAV8, AAV rh.74, AAV rh.10, AAV12, AAV.DJ, AAV.ie, AAV1.9-3, AAV.Anc80, AAV.Anc80L65, AAV2.7m8, or AAV8BP2 capsid polypeptide.

22. The composition of claim 20, wherein the AAV capsid protein is an engineered AAV capsid protein having reduced or eliminated uptake in a non-CNS cell as compared to a corresponding wild-type AAV capsid polypeptide.

23. The composition of claim 22, wherein the non-CNS cell is a liver cell or a dorsal root ganglion (DRG) neuron.

24. The composition of claim 22, wherein the wild-type capsid polypeptide is an AAV1, AAV2, AAV3, AAV4, AAV5, AAV6, AAV7, AAV8, AAV9, AAV rh.74, AAV rh.10, AAV12, AAV.DJ, AAV.ie, AAV1.9-3, AAV.Anc80, AAV.Anc80L65, AAV2.7m8, or AAV8BP2 capsid polypeptide.

25. The composition of claim 22, wherein the engineered AAV capsid protein comprises one or more mutations that result in reduced or eliminated uptake in a non-CNS cell.

26. The composition of claim 25, wherein the one or more mutations are
a. in position 267,
b. in position 269,
c. in position 272,
d. in position 504,
e. in position 505,
f. in position 585,
g. in position 590,
h. or any combination thereof
in the AAV9 capsid protein (SEQ ID NO: 1) or in one or more positions corresponding thereto in a non-AAV9 capsid polypeptide.

27. The composition of claim 26, wherein the non-AAV9 capsid protein is an AAV1, AAV2, AAV3, AAV4, AAV5, AAV6, AAV7, AAV8, AAV rh.74, AAV rh.10, AAV12, AAV.DJ, AAV.ie, AAV1.9-3, AAV.Anc80, AAV.Anc80L65, AAV2.7m8, or AAV8BP2 capsid polypeptide.

28. The composition of claim 26, wherein the mutation in position 267 in the AAV9 capsid protein (SEQ ID NO: 1) or position corresponding thereto in a non-AAV9 capsid polypeptide is a G or X mutation to A, wherein X is any amino acid.

29. The composition of claim 26, wherein the mutation in position 269 in the AAV9 capsid protein (SEQ ID NO: 1) or position corresponding thereto in a non-AAV9 capsid polypeptide is an S or X to T mutation, wherein X is any amino acid.

30. The composition of claim 26, wherein the mutation in position 272 in the AAV9 capsid protein (SEQ ID NO: 1) or position corresponding thereto in a non-AAV9 capsid polypeptide is an N or to A mutation, wherein X is any amino acid.

31. The composition of claim 26, wherein the mutation in position 504 in the AAV9 capsid protein (SEQ ID NO: 1) or position corresponding thereto in a non-AAV9 capsid polypeptide is a G or X to A mutation, wherein X is any amino acid.

32. The composition of claim 26, wherein the mutation in position 505 in the AAV9 capsid protein (SEQ ID NO: 1) or position corresponding thereto in a non-AAV9 capsid polypeptide is a P or X to A mutation, wherein X is any amino acid.

33. The composition of claim 26, wherein the mutation in position 585 in the AAV9 capsid protein (SEQ ID NO: 1) or position corresponding thereto in a non-AAV9 capsid polypeptide is an R or X mutation to Q, wherein X is any amino acid.

34. The composition of claim 26, wherein the mutation in position 590 in the AAV9 capsid protein (SEQ ID NO: 1) or position corresponding thereto in a non-AAV9 capsid polypeptide is a Q or X to A mutation, wherein X is any amino acid.

35. The composition of claim 26, wherein the engineered AAV capsid protein is an engineered AAV9 capsid polypeptide comprising a mutation at position 267, position 269 or both of a wild-type AAV9 capsid protein (SEQ ID NO: 1), wherein the mutation at position 267 is a G to A mutation and wherein the mutation at position 269 is an S to T mutation.

36. The composition of claim 26, wherein the engineered AAV capsid protein is an engineered AAV9 capsid polypeptide comprising a mutation at position 590 of a wild-type AAV9 capsid protein (SEQ ID NO: 1), wherein the mutation at position 509 is a Q to A mutation.

37. The composition of claim 26, wherein the engineered AAV capsid protein is an engineered AAV9 capsid polypeptide comprising a mutation at position 504, position 505, or both of a wild-type AAV9 capsid protein (SEQ ID NO: 1), wherein the mutation at position 504 is a G to A mutation and wherein the mutation at position 505 is a P to A mutation.

38. The composition of claim 1, wherein the composition is an engineered viral particle.

39. The composition of claim 38, wherein the engineered viral particle is an engineered AAV viral particle.

40. The composition of claim 39, wherein the AAV viral particle is an engineered AAV1, AAV2, AAV3, AAV4, AAV5, AAV6, AAV7, AAV8, AAV9, AAV rh.74, AAV rh.10, AAV12, AAV.DJ, AAV.ie, AAV1.9-3, AAV.Anc80, AAV.Anc80L65, AAV2.7m8, or AAV8BP2 viral particle.

41. The composition of claim 1, wherein the optional cargo is capable of treating or preventing a CNS, an eye, or inner ear disease or disorder.

42. The composition of claim 1, wherein the optional cargo comprises one or more specific RNAi molecule binding sequences specific for an RNAi molecule endogenous to a non-target cell, wherein expression of the RNAi molecule(s) is/are enriched in the non-target cell as compared to a CNS cell and/or specific for synthetic RNAi molecule(s).

43. The composition of claim 42, wherein the RNAi molecule is not expressed in a CNS cell.

44. The composition of claim 42, wherein the non-target cell is a liver cell or a dorsal root ganglion neuron.

45. The composition of claim 42, wherein the RNAi molecule is miR183, miR-182, miR122, miR122a, miR99a, miR-26a, miR199a, miRNA-143, miR101a, miR-30c, or any combination thereof.

46. The composition of claim 1, optionally wherein the viral protein is a capsid protein, wherein the composition is modified to
a. include one or more azides,
b. have a reduced number of one or more oxidation susceptible residues, wherein the oxidation susceptible residues are optionally Met, Tyr, Trp, His, Cys or any combination thereof;
c. is PEGylated, or is otherwise functionalized for PEGylation;
d. comprises one or more oligonucleotides tethered via click chemistry to the composition, optionally viral protein;
e. or any combination thereof.

47. A vector system comprising:
a vector comprising:
one or more polynucleotides, wherein at least one of the one or more polynucleotides encodes all or part of a targeting moiety effective to target a central nervous system (CNS) cell, wherein the targeting moiety comprises an n-mer insert optionally comprising or consisting of a P-motif or a double valine motif, or both,
wherein the P-motif comprises or consists of the amino acid sequence XₘPX₁X₂GTX₃RXₙ (SEQ ID NO: 8579), wherein X₁, X₂, X₃, Xₘ, and Xₙ, are each independently selected from any amino acid, wherein m is 0, 1, 2, or 3, and wherein n is 0, 1, 2, 3, 4, 5, 6, or 7,
wherein the double valine motif comprises or consists of the amino acid sequence XₘX₁X₂VX₃X₄VX₅Xₙ, wherein X₁, X₂, X₃, Xₘ, and Xₙ, are each independently selected from any amino acid, wherein m is 0, 1, 2, or 3, and wherein n is 0, 1, 2, 3, 4, 5, 6, or 7; and
optionally, a regulatory element operatively coupled to one or more of the one or more polynucleotides.

48. The vector system of claim 47, wherein X₂ of the P motif is Q, P, E, or H.

49. The vector system of claim 47, wherein X₁ of the P motif is a polar amino acid, optionally a polar uncharged amino acid.

50. The vector system of claim 47, wherein X₃ of the P motif is a nonpolar amino acid.

51. The vector system of claim 47, wherein X₁ of the double valine motif is R, K, V, or W.

52. The vector system of claim 47, wherein X₂ of the double valine motif is T, S, V, Y or R.

53. The vector system of claim 47, wherein X₃ of the double valine motif is G, P, or S.

54. The vector system of any one of the preceding claims, any one of the preceding claims, wherein X₄ of the double valine motif is S, D, or T.

55. The vector system of claim 47, wherein X₅ of the double valine motif is Y, G, S, or L.

56. The vector system of claim 47, wherein the targeting moiety comprises two or more n-mer inserts, optionally wherein each n-mer insert comprises or consists of a P-motif, wherein at least one of the P-motifs comprise or consists of the amino acid sequence XₘPX₁X₂GTX₃RXₙ (SEQ ID NO: 8579), wherein X₁, X₂, X₃, Xₘ, and Xₙ, are each independently selected from any amino acid, wherein m is 0, 1, 2, or 3, and wherein n is 0, 1, 2, 3, 4, 5, 6, or 7, optionally wherein X₂ of the P motif is Q, P, E, or H, optionally wherein the X₁ of the P motif is a polar amino acid, optionally a polar uncharged amino acid, and optionally wherein X₃ of the P motif is a nonpolar amino acid..

57. The vector system of claim 47, wherein the n-mer insert(s) and/or at least one P-motif and/or double valine motif is selected from any one n-mer insert and/or is encoded by a polynucleotide as set forth in one or more of SEQ ID NOs: 332-582 (Table 7), SEQ ID NOs:
583-8578 (Table 8), SEQ ID NOs: 3-819, 21-22, 24, 200, 202, 204, 212, 218, 224, 226, 228, 286, 234, 258, 260, 647, 649, 923, 1069, 1077, 1265, 2439, 2529, 2759, 3283, 3553, 3923, 4005, 4173, 4537, 4593, 4599, 4601, 4605, 4619, 4665, 4751, 4759, 4825, 4909, 4933, 5013, 5091, 5107, 5127, 5131, 5165, 5177, 5181, 5187, 5189, 5191, 5277, 5287, 5401, 5433, 5631, 5633, 5731, 5741, 5937, 6019, 6045, 6139, 6169, 6497, 7335, 8033, 8269, 8596-8613, (FIGS. 15A, 15B, 17A, 16A, 16B, 16C, and 19A-19C).

58. The vector system of claim 47, wherein the n-mer insert(s) are each 3-25 or 3-15 amino acids in length.

59. The vector system of claim 47, wherein
a. X₁ of the P motif is S, T, N, Q, C, Y or A,
b. X₂ of the P motif is Q, P, E, or H,
c. X₃ is G, A, M, W, L, V, F, or I, or any combination thereof.

60. The vector system of claim 47, further comprising a cargo.

61. The vector system of claim 60, wherein the cargo is a cargo polynucleotide and is optionally operatively coupled to one or more of the one or more polynucleotides encoding the targeting moiety.

62. The vector system of any one of claims 47-61, wherein the vector system is a viral vector system and is capable of producing virus particles, virus particles that contain the cargo, or both.

63. The vector system of claim 47, wherein the vector system is capable of producing a polypeptide comprising one or more of the targeting moieties.

64. The vector system of claim 63, wherein the polypeptide is a viral polypeptide.

65. The vector system of claim 64, wherein the viral polypeptide is a capsid polypeptide.

66. The vector system of claim 65, wherein the capsid polypeptide is an adeno associated virus (AAV) capsid polypeptide.

67. The vector system of claim 62, wherein the virus particles are AAV virus particles.

68. The vector system of claim 67, wherein the AAV virus particles or AAV capsid polypeptide are engineered AAV1, AAV2, AAV3, AAV4, AAV5, AAV6, AAV7, AAV8, AAV9, AAV rh.74, AAV rh.10, AAV12, AAV.DJ, AAV.ie, AAV1.9-3, AAV.Anc80, AAV.Anc80L65, AAV2.7m8, or AAV8BP2 viral particles or polypeptides.

69. The vector system of claim 64, wherein the n-mer insert(s) is/are incorporated into the viral polypeptide such that at least the n-mer insert(s) is/are located between two amino acids of the viral polypeptide such that at least the n-mer insert(s) is/are external to a viral capsid.

70. The vector system of claim 69, wherein one or more n-mer insert(s) are each incorporated into an AAV capsid polypeptide such that the n-mer insert(s), optionally the P-motif(s) and/or double valine motif(s), are each inserted between any two contiguous amino acids independently selected from amino acids 262-269, 327-332, 382-386, 452-460, 488-505, 527-539, 545-558, 581-593, 598-599, 704-714, or any combination thereof in an AAV9 capsid polypeptide or in an analogous position in an AAV1, AAV2, AAV3, AAV4, AAV5, AAV6, AAV7, AAV8, AAV rh.74, AAV rh.10, AAV12, AAV.DJ, AAV.ie, AAV1.9-3, AAV.Anc80, AAV.Anc80L65, AAV2.7m8, or AAV8BP2 capsid polypeptide.

71. The vector system of claim 69, wherein the at least one polynucleotide that encodes all or part of a targeting moiety is inserted between the codons corresponding to amino acid 588 and 589 in the AAV9 capsid polynucleotide or in an analogous position in an AAV1, AAV2, AAV3, AAV4, AAV5, AAV6, AAV7, AAV8, AAV rh.74, AAV rh.10, AAV12, AAV.DJ, AAV.ie, AAV1.9-3, AAV.Anc80, AAV.Anc80L65, AAV2.7m8, or AAV8BP2 capsid polypeptide.

72. The vector system of claim 66, wherein the AAV capsid polypeptide is an engineered AAV capsid polypeptide having reduced or eliminated uptake in a non-CNS cell as compared to a corresponding wild-type AAV capsid polypeptide.

73. The vector system of claim 72, wherein the non-CNS cell is a liver cell or a dorsal root ganglion (DRG) neuron.

74. The vector system of claim 72, wherein the wild-type capsid polypeptide is an AAV1, AAV2, AAV3, AAV4, AAV5, AAV6, AAV7, AAV8, AAV9, AAV rh.74, AAV rh.10, AAV12, AAV.DJ, AAV.ie, AAV1.9-3, AAV.Anc80, AAV.Anc80L65, AAV2.7m8, or AAV8BP2 capsid polypeptide.

75. The vector system of claim 72, wherein the engineered AAV capsid polypeptide comprises one or more mutations that result in reduced or eliminated uptake in a non-CNS cell.

76. The vector system of claim 75, wherein the one or more mutations are
a. in position 267,
b. in position 269,
c. in position 272,
d. in position 504,
e. in position 505,
f. in position 585,
g. in position 590,
h. or any combination thereof
in the AAV9 capsid polypeptide (SEQ ID NO: 1) or in one or more positions corresponding thereto in a non-AAV9 capsid polypeptide.

77. The vector system of claim 76, wherein the non-AAV9 capsid polypeptide is an AAV1, AAV2, AAV3, AAV4, AAV5, AAV6, AAV7, AAV8, AAV rh.74, AAV rh.10, AAV12, AAV.DJ, AAV.ie, AAV1.9-3, AAV.Anc80, AAV.Anc80L65, AAV2.7m8, or AAV8BP2 capsid polypeptide.

78. The vector system of claim 76, wherein the mutation in position 267 in the AAV9 capsid polypeptide (SEQ ID NO: 1) or position corresponding thereto in a non-AAV9 capsid polypeptide is a G or X mutation to A, wherein X is any amino acid.

79. The vector system of claim 76, wherein the mutation in position 269 in the AAV9 capsid polypeptide (SEQ ID NO: 1) or position corresponding thereto in a non-AAV9 capsid polypeptide is an S or X to T mutation, wherein X is any amino acid.

80. The vector system of claim 76, wherein the mutation in position 272 in the AAV9 capsid polypeptide (SEQ ID NO: 1) or position corresponding thereto in a non-AAV9 capsid polypeptide is an N or to A mutation, wherein X is any amino acid.

81. The vector system of claim 76, wherein the mutation in position 504 in the AAV9 capsid polypeptide (SEQ ID NO: 1) or position corresponding thereto in a non-AAV9 capsid polypeptide is a G or X to A mutation, wherein X is any amino acid.

82. The vector system of claim 76, wherein the mutation in position 505 in the AAV9 capsid polypeptide (SEQ ID NO: 1) or position corresponding thereto in a non-AAV9 capsid polypeptide is a P or X to A mutation, wherein X is any amino acid.

83. The vector system of claim 76, wherein the mutation in position 585 in the AAV9 capsid polypeptide (SEQ ID NO: 1) or position corresponding thereto in a non-AAV9 capsid polypeptide is an R or X to Q mutation, wherein X is any amino acid.

84. The vector system of claim 76, wherein the mutation in position 590 in the AAV9 capsid polypeptide (SEQ ID NO: 1) or position corresponding thereto in a non-AAV9 capsid polypeptide is a Q or X to A mutation, wherein X is any amino acid.

85. The vector system of claim 76, wherein the engineered AAV capsid polypeptide is an engineered AAV9 capsid polypeptide comprising a mutation at position 267, position 269, or both of a wild-type AAV9 capsid polypeptide (SEQ ID NO: 1), wherein the mutation at position 267 is a G to A mutation and wherein the mutation at position 269 is an S to T mutation.

86. The vector system of claim 76, wherein the engineered AAV capsid polypeptide is an engineered AAV9 capsid polypeptide comprising a mutation at position 590 of a wild-type AAV9 capsid polypeptide (SEQ ID NO: 1), wherein the mutation at position 509 is a Q to A mutation.

87. The vector system of claim 76, wherein the engineered AAV capsid polypeptide is an engineered AAV9 capsid polypeptide comprising a mutation at position 504, position 505, or both of a wild-type AAV9 capsid polypeptide (SEQ ID NO: 1), wherein the mutation at position 504 is a G to A mutation and wherein the mutation at position 505 is a P to A mutation.

88. The vector system of claim 60, wherein the cargo comprises one or more specific RNAi molecule binding sequences specific for an RNAi molecule endogenous to a non-target cell, wherein expression of the RNAi molecule(s) is/are enriched in the non-target cell as compared to a CNS cell and/or specific for synthetic RNAi molecule(s).

89. The vector system of claim 88, wherein the RNAi molecule is not expressed in a CNS cell.

90. The vector system of claim 88, wherein the non-target cell is a liver cell or a dorsal root ganglion neuron.

91. The vector system of claim 88, wherein the RNAi molecule is miR183, miR-182, miR122, miR122a, miR99a, miR-26a, miR199a, miRNA-143, miR101a, miR-30c, or any combination thereof.

92. The vector system of claim 63, optionally wherein the viral polypeptide is a capsid polypeptide, wherein the viral polypeptide is modified to
a. include one or more azides,
b. have a reduced number of one or more oxidation susceptible residues, wherein the oxidation susceptible residues are optionally Met, Tyr, Trp, His, Cys or any combination thereof;
c. is PEGylated, or is otherwise functionalized for PEGylation;
d. comprises one or more oligonucleotides tethered via click chemistry to the composition, optionally viral protein;
e. or any combination thereof.

93. The vector system of claim 63, wherein the viral vector and/or cargo is engineered to include one or more cis-acting elements or modifications, optionally
a. a reduced number of CpG islands;
b. one or more TLR9i oligonucleotides, optionally in one or both of the inverted terminal repeats of the vector system;
c. one or more regulatory elements to modify cargo expression;
d. a reduced number of ITR mimicking harpin or other structures;
e. or any combination thereof.

94. The vector system of claim 47, wherein the vector comprising the one or more polynucleotides does not comprise splice regulatory elements.

95. The vector system of claim 47, further comprising a polynucleotide that encodes a viral rep protein.

96. The vector system of claim 95, wherein the viral rep protein is an AAV rep protein.

97. The vector system of claim 95, wherein the polynucleotide that encodes the viral rep protein is on the same vector or a different vector as the one or more polynucleotides.

98. The vector system of claim 95, wherein the polynucleotide that encodes the viral rep protein is operatively coupled to a regulatory element.

99. The vector system of claim 47, wherein the vector system encodes and/or is capable of producing a composition or portion thereof as in any one of claims 1-46.

100. A polynucleotide encoding a composition or portion thereof as in any one of claims 1-46.

101. A polypeptide encoded by and/or produced by a vector system as in any of claims 47-99, or a polynucleotide of claim 100.

102. The polypeptide of claim 101, wherein the polypeptide is a viral polypeptide.

103. The polypeptide of claim 102, wherein the viral polypeptide is an AAV polypeptide.

104. The polypeptide of claim 101, wherein the polypeptide is coupled to or otherwise associated with a cargo.

105. The polypeptide of claim 104, wherein the cargo comprises one or more specific RNAi molecule binding sequences specific for an RNAi molecule endogenous to a non-target cell, wherein expression of the RNAi molecule(s) is/are enriched in the non-target cell as compared to a CNS cell and/or specific for synthetic RNAi molecule(s).

106. The polypeptide of claim 105, wherein the RNAi molecule is not expressed in a CNS cell.

107. The polypeptide of claim 104, wherein the non-target cell is a liver cell or a dorsal root ganglion neuron.

108. The polypeptide of claim 104, wherein the RNAi molecule is miR183, miR-182, miR122, miR122a, miR99a, miR-26a, miR199a, miRNA-143, miR101a, miR-30c, or any combination thereof.

109. The polypeptide of claim 101, wherein the polypeptide includes one or more azides; has a reduced number of one or more oxidation susceptible residues, wherein the oxidation susceptible residues are optionally Met, Tyr, Trp, His, Cys or any combination thereof; is PEGylated, or is otherwise functionalized for PEGylation; comprises one or more oligonucleotides tethered via click chemistry to the composition, optionally viral protein; or any combination thereof.

110. A particle produced by a vector system as in any one of claims 47-99, optionally including a polypeptide as in any one of claims 101-109.

111. The particle of claim 110, wherein the particle is a viral particle.

112. The particle of claim 111, wherein the viral particle is an adeno-associated virus (AAV) particle, lentiviral particle, or a retroviral particle.

113. The particle of claim 110, wherein the particle comprises a cargo.

114. The particle of claim 110, wherein the viral particle has a central nervous system (CNS) tropism.

115. The particle of claim 110, wherein the cargo comprises one or more specific RNAi molecule binding sequences specific for an RNAi molecule endogenous to a non-target cell, wherein expression of the RNAi molecule(s) is/are enriched in the non-target cell as compared to a CNS cell and/or specific for synthetic RNAi molecule(s).

116. The particle of claim 115, wherein the RNAi molecule is not expressed in a CNS cell.

117. The particle of claim 115, wherein the non-target cell is a liver cell or a dorsal root ganglion neuron.

118. The particle of claim 115, wherein the RNAi molecule is miR183, miR-182, miR122, miR122a, miR99a, miR-26a, miR199a, miRNA-143, miR101a, miR-30c, or any combination thereof.

119. The particle of claim 110, wherein the polypeptide includes one or more azides; has a reduced number of one or more oxidation susceptible residues, wherein the oxidation susceptible residues are optionally Met, Tyr, Trp, His, Cys or any combination thereof; is PEGylated, or is otherwise functionalized for PEGylation; comprises one or more oligonucleotides tethered via click chemistry to the composition, optionally viral protein; or any combination thereof.

120. The vector system of any one of claims 47-99, the polypeptide as in any one of claims 100-109, or the particle of any one of claims 110-119, wherein the cargo is capable of treating or preventing a CNS, an eye, or an inner ear disease or disorder.

121. A cell comprising:
a. a composition as in any of claims 1-46;
b. a vector system as in any one of claims 66-99 or 120;
c. a polynucleotide as in claim 100;
d. a polypeptide as in any one of claims 101-109 or 120;
e. a particle of any one of claims 110-120; or
f. any combination thereof.

122. The cell of claim 121, wherein the cell is prokaryotic.

123. The cell of claim 121, wherein the cell is eukaryotic.

124. A pharmaceutical formulation comprising:
a. a composition as in any of claims 1-46;
b. a vector system as in any one of claims 66-99 or 120;
c. a polynucleotide as in claim 100;
d. a polypeptide as in any one of claims 101-109 or 120;
e. a particle of any one of claims 110-120;
f. a cell as in any one of claims 121-123; or
any combination thereof; and
a pharmaceutically acceptable carrier.

125. A method of treating a central nervous system, an eye, an inner ear, a pain disease, disorder, or a symptom thereof or a pain comprising:
administering, to the subject in need thereof,
a. a composition as in any of claims 1-46;
b. a vector system as in any one of claims 66-99 or 120;
c. a polynucleotide as in claim 100;
d. a polypeptide as in any one of claims 101-109 or 120;
e. a particle of any one of claims 110-120;
f. a cell as in any one of claims 121-123;
g. a pharmaceutical formulation as in claim 124; or
h. any combination thereof.

126. The method of claim 125, wherein the central nervous system disease or disorder comprises a secondary muscle disease, disorder, or symptom thereof.

127. The method of any one of claims 125-126, wherein the central nervous system disease or disorder is Friedreich's Ataxia, Dravet Syndrome, Spinocerebellar Ataxia Type 3, Niemann Pick Type C, Huntington's Disease, Pompe Disease, Myotonic Dystrophy Type 1, Glut1 Deficiency Syndrome (De Vivo Syndrome), Tay-Sachs, Spinal Muscular Atrophy, Alzheimer's disease, Amyotrophic lateral sclerosis (ALS), Danon disease, Rett Syndrome, Angleman Syndrome, infantile neuronal dystorpy, Gaucher's disease, Krabbe disease, metachromatic leukodystrophy, Salla disease, Farber disease or Spinal Musular Atrophy with progressive myoclonic Epilepsy (also reffered to as Jankovic-Rivera syndrome, Unverricht-Lundborg disease, AADC deficiency, Parkinson's disease, Batten disease, a neuronal ceroid lipofuscinosis disease, giant axonal neuropathy, a mucopolysaccharidosis disease (e.g., Hurler syndrome, MPS III A-D), neurofibromatosis, a spinocerebellar ataxia disease, Sandoff disease, GM2 gangliosidosis, Canavan disease, Cockayne syndrome, a pain disease or disorder, a pain, a neuropathy or any combination thereof.

128. The method of any one of claims 125-127, wherein the eye disease or disorder is Stargardt disease, a Leber's congenital amaurosis (LCA) (e.g., Leber's congenital amaurosis type 2, LEBER CONGENITALAMAUROSIS (LCA) ANDEARLY-ONSET SEVERE RETINALDYSTROPHY (EOSRD)), Choroideremia, a macular degeneration, diabetic retinopathy, a retinopathy, vitelliform macular dystrophy, a macular dystrophy, Sorsby's fundus dystrophy, cataracts, glaucoma, optic neuropathies, Marfan syndrome, myopia, polypoidal choroidal vasculopathies, retinitis pigmentosa, uveal melanoma, X-linked retinoschisis, pattern dystrophy, achromatopsia, Blue cone monochromatism, Bornholm eye disease, ADGUCA1A-associated COD/CORD, autosomal dominant PRPH2 associated CORD, X-linkedRPGR-associatedCOD/CORD, fundus albipunctatus, Enhanced S-conesyndrome, Bietti crystalline comeoretinaldystorphy, or any combination thereof.

129. The method of any one of claims 125-128, wherein the inner ear disease or disorder is GJB-2 deafness, Jeryell and Lange-Nielsen syndrome, Usher syndrome, Alport syndrome, Branchio-oto-renal syndrome, Waardenburg syndrome, Pendred syndrome, Stickler syndrome, Treacher Collins syndrome, CHARGE syndrome, Norrie disease, Perrault syndrome, Autosomal dominant Nonsyndromic hearing loss, utosomal Recessive Nonsyndromic Hearing Loss, X-linked nonsyndromic hearing loss, an auditory neuropathy, a congenital hearing loss, or any combination thereof.
